(19) United States
(12) Patent Application Publication
(10) Pub. No.: US 2025/0154526 A1
(43) Pub. Date: May 15, 2025

(54) METHOD OF OBTAINING A MODIFIED ADENO-ASSOCIATED VIRUS CAPSID

(71) Applicant: JOINT STOCK COMPANY "BIOCAD", Saint Petersburg (RU)

(72) Inventors: Anna Nikolaevna STRELKOVA, Yaransk (RU); Sergei Aleksandrovich LEGOTSKII, Moscow (RU); Tatiana Evgenievna SHUGAEVA, Moscow (RU); Pavel Mikhailovich GERSHOVICH, Saint Petersburg (RU); Alexandr Anatolevich NADOLINSKII, Saint Petersburg (RU); Pavel Andreevich IAKOVLEV, Saint Petersburg (RU); Dmitry Valentinovich MOROZOV, Saint-Petersburg (RU)

(21) Appl. No.: 18/684,984

(22) PCT Filed: Aug. 18, 2022
(86) PCT No.: PCT/RU2022/050255

§ 371 Date: Feb. 20, 2024

(30) Foreign Application Priority Data
Aug. 20, 2021 (RU) 2021124731

(51) Int. Cl. C12N 15/86; A61K 48/00; C07K 14/005; G16B 20/50; G16B 30/10

(52) U.S. Cl. CPC C12N 15/86; A61K 48/0041; C07K 14/005; G16B 20/50; G16B 30/10; C12N 2750/14122; C12N 2750/14143

(57) ABSTRACT

The present application relates to the fields of gene therapy and molecular biology. More specifically, the present invention relates to a method for producing a modified adeno-associated virus (AAV) capsid and to a modified AAV capsid produced by said method, as well as to an isolated nucleic acid encoding said modified capsid and a vector based on recombinant adeno-associated virus for delivering a heterologous nucleic acid sequence to a subject, which includes said modified capsid.

### FIELD OF THE INVENTION

[0001] The present application relates to the fields of gene therapy and molecular biology. More specifically, the present invention relates to a method for producing a modified adeno-associated virus (AAV) capsid and to a modified AAV capsid produced by said method, as well as to an isolated nucleic acid encoding said modified capsid and a vector based on recombinant adeno-associated virus for delivering a heterologous nucleic acid sequence to a subject, which includes said modified capsid.

### BACKGROUND OF THE INVENTION

[0002] Adeno-associated virus (AAV) is a small (25 nm), independent replication-defective, nonenveloped virus. Many different AAV serotypes have been described in human and primates. The adeno-associated virus genome is composed of (+ or −) single-stranded DNA (ssDNA) being about 4,700 nucleotides long. At the ends of a genomic DNA molecule there are accommodated terminal inverted repeats (ITRs). The genome comprises two open reading frames (ORFs): Rep and Cap comprising several alternative reading frames encoding various protein products. The rep products are essential for AAV replication, whereas three capsid proteins (VP1, VP2, and VP3), along with other alternative products, are encoded by the Cap gene. VP1, VP2, and VP3 proteins are present at 1:1:10 ratio to form an icosahedral capsid (Xie Q. et al. The atomic structure of adeno-associated virus (AAV-2), a vector for human gene therapy. Proc Natl Acad Sci USA, 2002; 99:10405-10410). During recombinant AAV (rAAV) vector production, an expression cassette flanked by ITR is packaged into an AAV capsid. The genes required for AAV replication are not included in the cassette. Recombinant AAV is considered to be one of the safest and most widely used viral vectors for in vivo gene transfer. Vectors can infect cells of multiple tissue types to provide strong and sustained transgene expression. They are also non-pathogenic, and have a low immunogenicity profile (High K A et al., “rAAV human trial experience” Methods Mol Biol. 2011; 807:429-57).

[0003] One of the urgent purposes of research in the area of development of effective gene therapy is optimization of vectors to improve certain properties of the given vectors.

[0004] The various AAV serotypes are characterized by affinity for distinct host cell surface receptors, toward which they have tropism. Thus, the primary known receptor for AAV2 is heparan sulfate proteoglycan, the coreceptors are integrin heterodimer aVβ5, fibroblast growth factor receptor type 1, and hepatocyte growth factor receptor, c-Met. AAV12 binds to heparan sulfate proteoglycans and sialic acid. AAV4 and AAV5 bind to N- and O-linked sialic acids, respectively. AAV5 activates the platelet-derived growth factor receptor. Further, a relationship has been established between the amino acid sequence of AAV capsid proteins and the process of assembly thereof, encapsidation of the genome, affinity for different types of receptors represented on the surface of host cells (Govindasamy L. et. al. Structural insights into adeno-associated virus serotype 5. J Virol. 2013 October; 87 (20): 11187-99).

[0005] The international application WO2012145601 describes adeno-associated virus (AAV) virions with variant capsid protein, wherein the AAV virions exhibit greater infectivity of retinal cells, when administered via intravitreal injection, compared to wild-type AAV.

[0006] The international application WO2013158879 describes an adeno-associated virus (AAV) vector for delivering to a subject a heterologous nucleic acid sequence comprising the capsid protein VP1 comprising one or more lysine substitutions, wherein one lysine substitution is K137R, wherein said lysine substitution is effective for inhibiting ubiquitination of said capsid protein, thereby increasing transduction efficiency of said AVV vector in target cells.

[0007] To date, there is a need for AAV with improved properties compared to wild-type AAV, for example, which have increased transduction ability, greater specific ability to transduce cells of target organs and tissues, increased capsid capacity, increased efficiency of packaging of AAV viral genomes, as well as increased efficiency of generation due to highly efficient production (assembly) of encapsidated viral vectors based on recombinant adeno-associated virus (rAAV).

### DESCRIPTION OF THE INVENTION

[0008] The inventors have found that the method for producing a modified adeno-associated virus (AAV) capsid according to the invention surprisingly makes it possible to produce a modified AAV capsid having one or more improved properties as compared to AAV capsid free of these modifications (wild-type AAV capsid), which are selected from the group:
[0009] increased efficiency of cell transduction,
[0010] increased production of target protein,
[0011] increased efficiency of generation due to highly efficient production (assembly) of encapsidated viral vectors based on recombinant adeno-associated virus (rAAV).

### SUMMARY OF THE INVENTION

[0012] In one aspect, the present invention relates to a method for producing a modified AAV capsid, comprising:
[0013] a) determining amino acids in capsomere protein of the modified AAV, which are located in the interaction interface region of adjacent pentameric subunits of the capsid;
[0014] b) aligning structurally the modified AAV capsid to the template capsid to determine the pairwise correspondence between each amino acid of the modified AAV from the interaction interface region between adjacent pentameric subunits and the amino acid closest thereto of the template capsid, as a structural analogue of the initial amino acid that is considered a potential substitution,
[0015] wherein the template capsid is understood to mean a structurally similar capsid of a virus selected from the family Parvoviridae, which is other than AAV;
[0016] c) comparing pairwisely amino acid residues, determined in step b), of the AAV capsid and the template capsid to identify structural differences between the modified AAV capsid and the template capsid in the interaction interface region of adjacent pentameric subunits of the capsid;
[0017] d) selecting positions for mutagenesis, wherein the amino acid residues for mutagenesis are located in the interaction interface region of adjacent pentameric subunits of the modified AAV capsid and have a structural difference between the modified AAV capsid and the template capsid in the interaction interface region of adjacent pentameric subunits of the capsid;
[0018] e) selecting an amino acid residue for mutagenesis at position selected in step d) using one of the following principles:
   [0019] substitution of the initial amino acid in the capsomere protein of the modified AAV for an amino acid that has a greater volume, other than cysteine and methionine;
   [0020] substitution of the initial amino acid in the capsomere protein of the modified AAV for an amino acid that has an increased or decreased number of polar contacts between the capsomeres, other than cysteine and methionine;
[0021] f) introducing one or more amino acid substitutions selected in steps d)-e) in the interaction interface region of adjacent pentameric subunits of the modified AAV capsid.

[0022] In some embodiments of the invention, the method for producing a modified AAV capsid further comprises checking the modified AAV capsids produced in step f) with one or more amino acid substitutions for the presence of one or more improved properties as compared to AAV capsid free of these modifications, wherein the one or more improved properties are selected from the group:
[0023] increased efficiency of cell transduction,
[0024] increased production of target protein,
[0025] increased efficiency of generation due to highly efficient production (assembly) of encapsidated viral vectors based on recombinant adeno-associated virus (rAAV).

[0026] In some embodiments of the invention, the method for producing a modified AAV capsid further comprises checking the modified AAV capsids produced in step f) for the presence of one or more improved properties as compared to AAV capsid free of these modifications and selecting modified AAV capsids that have one or more improved properties as compared to AAV capsid free of these modifications, wherein the one or more improved properties are selected from the group:
[0027] increased efficiency of cell transduction,
[0028] increased production of target protein,
[0029] increased efficiency of generation due to highly efficient production (assembly) of encapsidated viral vectors based on recombinant adeno-associated virus (rAAV).

[0030] In some embodiments of the method for producing an AAV capsid, the modified AAV capsid is selected from the group comprising: human AAV, simian AAV, or avian AAV.

[0031] In some embodiments of the method for producing an AAV capsid, the modified AAV capsid is selected from the group comprising the following AAV serotypes: AAV1, AAV2, AAV3, AAV4, AAV5, AAV6, AAV7, AAV8, AAV9, AAV10 AAV11, AAV12, AAV13, AAV14, AAV15 or AAV16.

[0032] In some embodiments of the method for producing an AAV capsid, the structurally similar template capsid is selected from the group comprising: parvovirus B19, human bocavirus 1 (HBoV1), bovine parvovirus (BVP).

[0033] In one aspect, the present invention relates to a modified AAV capsid for producing viral vectors based on recombinant adeno-associated virus produced by a method comprising:
[0034] a) determining amino acids in capsomere protein of the modified AAV, which are located in the interaction interface region of adjacent pentameric subunits of the capsid;
[0035] b) aligning structurally the modified AAV capsid to the template capsid to determine the pairwise correspondence between each amino acid of the modified AAV from the interaction interface region between adjacent pentameric subunits and the amino acid closest thereto of the template capsid, as a structural analogue of the initial amino acid that is considered a potential substitution,
[0036] wherein the template capsid is understood to mean a structurally similar capsid of a virus selected from the family Parvoviridae, which is other than AAV;
[0037] c) comparing pairwisely amino acid residues, determined in step b), of the AAV capsid and the template capsid to identify structural differences between the modified AAV capsid and the template capsid in the interaction interface region of adjacent pentameric subunits of the capsid;
[0038] d) selecting positions for mutagenesis, wherein the amino acid residues for mutagenesis are located in the interaction interface region of adjacent pentameric subunits of the modified AAV capsid and have a structural difference between the modified AAV capsid and the template capsid in the interaction interface region of adjacent pentameric subunits of the capsid;
[0039] e) selecting an amino acid residue for mutagenesis at position selected in step d) using one of the following principles:
   [0040] substitution of the initial amino acid in the capsomere protein of the modified AAV for an amino acid that has a greater volume, other than cysteine and methionine;
   [0041] substitution of the initial amino acid in the capsomere protein of the modified AAV for an amino acid that has an increased or decreased number of polar contacts between the capsomeres, other than cysteine and methionine;
[0042] f) introducing one or more amino acid substitutions selected in steps d)-e) in the interaction interface region of adjacent pentameric subunits of the modified AAV capsid;
[0043] and, if necessary, further comprising
[0044] g) checking the modified AAV capsids produced in step f) for the presence of one or more improved properties as compared to AAV capsid free of these modifications and selecting modified AAV capsids that have one or more improved properties as compared to AAV capsid free of these modifications, wherein the one or more improved properties are selected from the group:
   [0045] increased efficiency of cell transduction,
   [0046] increased production of target protein,
   [0047] increased efficiency of generation due to highly efficient production (assembly) of encapsidated viral vectors based on recombinant adeno-associated virus (rAAV).

[0048] In some embodiments of the modified AAV capsid, the modified AAV capsid is selected from the group comprising: human AAV, simian AAV, or avian AAV.

[0049] In some embodiments of the modified AAV capsid, the modified AAV capsid is selected from the group comprising the following AAV serotypes: AAV1, AAV2, AAV3, AAV4, AAV5, AAV6, AAV7, AAV8, AAV9, AAV10 AAV11, AAV12, AAV13, AAV14, AAV15 or AAV16.

[0050] In one aspect, the present invention relates to a modified AAV capsid for producing viral vectors based on recombinant adeno-associated virus, which includes a modified AAV capsid protein VP1 having an amino acid sequence that is selected from the group: SEQ ID No: 14, 20, 26, 32, 38, 44, 50, 56, 62, 68, 74, 80, 86, 92, 98, 104, 110, 116, 122, 128, 134, 140, 146, 152, 158, 164, 170, 176, 182, 188, 194, 200, 206, 212, 218, 224, 230, 236, 242, 248, 254, 260, 266, 272, 278, 284, 290, 296, 302, 308, 314, 320, 326, 332, 338, 344, 350, 356, 362, or 368.

[0051] In some embodiments of the invention, the modified AAV capsid comprises:
[0052] a) a modified AAV capsid protein VP1 having an amino acid sequence that is selected from the group: SEQ ID No: 14, 20, 26, 32, 38, 44, 50, 56, 62, 68, 74, 80, 86, 92, 98, 104, 110, 116, 122, 128, 134, 140, 146, 152, 158, 164, 170, 176, 182, 188, 194, 200, 206, 212, 218, 224, 230, 236, 242, 248, 254, 260, 266, 272, 278, 284, 290, 296, 302, 308, 314, 320, 326, 332, 338, 344, 350, 356, 362, or 368;
[0053] b) a modified AAV capsid protein VP2 corresponding to protein VP1 thereof, said modified AAV capsid protein VP2 having an amino acid sequence that is selected from the group: SEQ ID No: 16, 22, 28, 34, 40, 46, 52, 58, 64, 70, 76, 82, 88, 94, 100, 106, 112, 118, 124, 130, 136, 142, 148, 154, 160, 166, 172, 178, 184, 190, 196, 202, 208, 214, 220, 226, 232, 238, 244, 250, 256, 262, 268, 274, 280, 286, 292, 298, 304, 310, 316, 322, 328, 334, 340, 346, 352, 358, 364, or 370;
[0054] c) a modified AAV capsid protein VP3 corresponding to protein VP1 thereof, said modified AAV capsid protein VP3 having an amino acid sequence that is selected from the group: SEQ ID No: 18, 24, 30, 36, 42, 48, 54, 60, 66, 72, 78, 84, 90, 96, 102, 108, 114, 120, 126, 132, 138, 144, 150, 156, 162, 168, 174, 180, 186, 192, 198, 204, 210, 216, 222, 228, 234, 240, 246, 252, 258, 264, 270, 276, 282, 288, 294, 300, 306, 312, 318, 324, 330, 336, 342, 348, 354, 360, 366, or 372.

[0055] In one aspect, the present invention relates to an isolated nucleic acid that encodes any of the above modified capsids.

[0056] In one aspect, the present invention relates to a vector based on recombinant adeno-associated virus for delivering to a subject a heterologous nucleic acid sequence, which includes:
[0057] 1) any of the above modified capsids, and
[0058] 2) a heterologous nucleic acid sequence comprising regulatory sequences that promote the expression of the product encoded by the heterologous nucleic acid sequence, in the target cells.

[0059] In some embodiments, the vector based on recombinant adeno-associated virus has a product of expression of the heterologous nucleic acid sequence, which is a therapeutic polypeptide or a reporter polypeptide.

### BRIEF DESCRIPTION OF DRAWINGS

[0060] FIG. 1 is a circular scheme of plasmid pAAV-linker intended for cloning the libraries of random variants of AAV capsid gene.
[0061] GFP is a sequence encoding green fluorescent protein,
[0062] PolyA is a polyadenylation signal,
[0063] ITR is an inverted terminal repeat of adeno-associated virus,
[0064] T2A is a sequence encoding a self-cleaving peptide from a polypeptide chain from the virus Thosea asigna,
[0065] HBG intron is human beta-globin intron,
[0066] CMVpromoter is human cytomegalovirus promoter,
[0067] AmpR is a sequence of the beta-lactamase gene that provides E. coli resistance to ampicillin,
[0068] pUC origin is a high-copy bacterial replication origin,
[0069] EcoRI is EcoRI restriction endonuclease recognition site,
[0070] AscI is AscI restriction endonuclease recognition site.

[0071] FIG. 2 is a circular scheme of plasmid pAAV-Rep intended for producing recombinant viral products of wild-type AAV from the library of random variants.
[0072] AmpR is a sequence of the beta-lactamase gene that provides E. coli resistance to ampicillin,
[0073] pUC origin is a high-copy bacterial replication origin,
[0074] AAV Rep genes are a sequence encoding Rep proteins required for the virus life cycle,
[0075] SwaI is SwaI restriction endonuclease recognition site,
[0076] NotI is NotI restriction endonuclease recognition site.

[0077] FIG. 3 is a circular scheme of plasmid pHelper intended for producing recombinant viral products of wild-type AAV from the library of random variants.
[0078] AmpR is a beta-lactamase gene that provides resistance to ampicillin,
[0079] Ori is a replication origin in bacteria,
[0080] Adeno E2A is a helper adenovirus gene sequence involved in viral DNA replication,
[0081] Adeno E4 is a helper adenovirus gene sequence involved in viral DNA replication,
[0082] Adeno VARNA is a helper adenovirus gene sequence responsible for the translation of both early and late viral genes.

[0083] FIG. 4 is a circular diagram of the plasmid pAAV-RC5 intended for generating recombinant AAV serotype 5 viral products.
[0084] AmpR is a sequence of the beta-lactamase gene that provides E. coli resistance to ampicillin, pUC origin is a high-copy prokaryotic replication origin.
[0085] AAV Rep genes are a sequence encoding Rep proteins required for the adeno-associated virus life cycle,
[0086] AAV5 Cap genes is a sequence encoding overlapping nucleotide sequences of the adeno-associated virus serotype 5 capsid proteins: VP1, VP2 and VP3.

[0087] FIG. 5 is a circular diagram of the plasmid pAAV-RC9 intended for generating recombinant AAV serotype 9 viral products.
[0088] AmpR is a sequence of the beta-lactamase gene that provides E. coli resistance to ampicillin, pUC origin is a high-copy prokaryotic replication origin.
[0089] AAV Rep genes are a sequence encoding Rep proteins required for the adeno-associated virus life cycle,
[0090] AAV9 Cap genes is a sequence encoding overlapping nucleotide sequences of the adeno-associated virus serotype 9 capsid proteins: VP1, VP2 and VP3.

[0091] FIG. 6 is a graph showing generation efficiency for vectors based on modified adeno-associated virus serotype 5 (rAAV5).
[0092] Vg/ml cf refers to viral genome count per milliliter of culture fluid.
[0093] AAV5-NullMut-GFP refers to a vector based on rAAV5 with a wild-type capsid protein VP1.
[0094] AAV5-01Mut-GFP refers to a vector based on modified adeno-associated virus serotype 5 (rAAV5) comprising a modified AAV5 capsid protein VP1 with the mutations S2A and T711S.
[0095] AAV5-02Mut-GFP refers to a vector based on modified adeno-associated virus serotype 5 (rAAV5) comprising a modified AAV5 capsid protein VP1 with the mutations S2A, G226A and T711S.
[0096] AAV5-03Mut-GFP refers to a vector based on modified adeno-associated virus serotype 5 (rAAV5) comprising a modified AAV5 capsid protein VP1 with the mutations S2A, D286E and T711S.
[0097] AAV5-04Mut-GFP refers to a vector based on modified adeno-associated virus serotype 5 (rAAV5) comprising a modified AAV5 capsid protein VP1 with the mutations S2A, L341Y and T711S.
[0098] AAV5-05Mut-GFP refers to a vector based on modified adeno-associated virus serotype 5 (rAAV5) comprising a modified AAV5 capsid protein VP1 with the mutations S2A, C387V and T711S.
[0099] AAV5-06Mut-GFP refers to a vector based on modified adeno-associated virus serotype 5 (rAAV5) comprising a modified AAV5 capsid protein VP1 with the mutations S2A, Q421H and T711S.
[0100] AAV5-07Mut-GFP refers to a vector based on modified adeno-associated virus serotype 5 (rAAV5) comprising a modified AAV5 capsid protein VP1 with the mutations S2A, P466T and T711S.
[0101] AAV5-08Mut-GFP refers to a vector based on modified adeno-associated virus serotype 5 (rAAV5) comprising a modified AAV5 capsid protein VP1 with the mutations S2A, S594Q and T711S.
[0102] AAV5-09Mut-GFP refers to a vector based on modified adeno-associated virus serotype 5 (rAAV5) comprising a modified AAV5 capsid protein VP1 with the mutations S2A, T614L and T711S.
[0103] AAV5-10Mut-GFP refers to a vector based on modified adeno-associated virus serotype 5 (rAAV5) comprising a modified AAV5 capsid protein VP1 with the mutations S2A, N679K and T711S.
[0104] AAV5-11Mut-GFP refers to a vector based on modified adeno-associated virus serotype 5 (rAAV5) comprising a modified AAV5 capsid protein VP1 with the mutations S2A, P723V and T711S.
[0105] AAV5-12Mut-GFP refers to a vector based on modified adeno-associated virus serotype 5 (rAAV5) comprising a modified AAV5 capsid protein VP1 with the mutations S2A, V431Y and T711S.
[0106] AAV5-13Mut-GFP refers to a vector based on modified adeno-associated virus serotype 5 (rAAV5) comprising a modified AAV5 capsid protein VP1 with the mutations S2A, A616D and T711S.
[0107] AAV5-14Mut-GFP refers to a vector based on modified adeno-associated virus serotype 5 (rAAV5) comprising a modified AAV5 capsid protein VP1 with the mutations S2A, W683R and T711S.
[0108] AAV5-15Mut-GFP refers to a vector based on modified adeno-associated virus serotype 5 (rAAV5) comprising a modified AAV5 capsid protein VP1 with the mutations S2A, S222A and T711S.
[0109] AAV5-16Mut-GFP refers to a vector based on modified adeno-associated virus serotype 5 (rAAV5) comprising a modified AAV5 capsid protein VP1 with the mutations S2A, R285L and T711S.
[0110] AAV5-17Mut-GFP refers to a vector based on modified adeno-associated virus serotype 5 (rAAV5) comprising a modified AAV5 capsid protein VP1 with the mutations S2A, Q340A and T711S.
[0111] AAV5-18Mut-GFP refers to a vector based on modified adeno-associated virus serotype 5 (rAAV5) comprising a modified AAV5 capsid protein VP1 with the mutations S2A, S420F and T711S.
[0112] AAV5-19Mut-GFP refers to a vector based on modified adeno-associated virus serotype 5 (rAAV5) comprising a modified AAV5 capsid protein VP1 with the mutations S2A, S680A and T711S.
[0113] AAV5-20Mut-GFP refers to a vector based on modified adeno-associated virus serotype 5 (rAAV5) comprising a modified AAV5 capsid protein VP1 with the mutations S2A, T721V and T711S.

[0114] FIG. 7 is a graph showing generation efficiency for vectors based on modified adeno-associated virus serotype 5 (rAAV5).
[0115] Vg/ml cf refers to viral genome count per milliliter of culture fluid.
[0116] AAV5-NullMut-GFP refers to a vector based on rAAV5 with a wild-type capsid protein VP1.
[0117] AAV5-01Mut-GFP refers to a vector based on modified adeno-associated virus serotype 5 (rAAV5) comprising a modified AAV5 capsid protein VP1 with the mutations S2A and T711S.
[0118] AAV5-21Mut-GFP refers to a vector based on modified adeno-associated virus serotype 5 (rAAV5) comprising a modified AAV5 capsid protein VP1 with the mutation G226A.
[0119] AAV5-22Mut-GFP refers to a vector based on modified adeno-associated virus serotype 5 (rAAV5) comprising a modified AAV5 capsid protein VP1 with the mutation D286E.
[0120] AAV5-23Mut-GFP refers to a vector based on modified adeno-associated virus serotype 5 (rAAV5) comprising a modified AAV5 capsid protein VP1 with the mutation L341Y.
[0121] AAV5-24Mut-GFP refers to a vector based on modified adeno-associated virus serotype 5 (rAAV5) comprising a modified AAV5 capsid protein VP1 with the mutation C387V.
[0122] AAV5-25Mut-GFP refers to a vector based on modified adeno-associated virus serotype 5 (rAAV5) comprising a modified AAV5 capsid protein VP1 with the mutation Q421H.
[0123] AAV5-26Mut-GFP refers to a vector based on modified adeno-associated virus serotype 5 (rAAV5) comprising a modified AAV5 capsid protein VP1 with the mutation P466T.
[0124] AAV5-27Mut-GFP refers to a vector based on modified adeno-associated virus serotype 5 (rAAV5) comprising a modified AAV5 capsid protein VP1 with the mutation S594Q.
[0125] AAV5-28Mut-GFP refers to a vector based on modified adeno-associated virus serotype 5 (rAAV5) comprising a modified AAV5 capsid protein VP1 with the mutation T614L.
[0126] AAV5-29Mut-GFP refers to a vector based on modified adeno-associated virus serotype 5 (rAAV5) comprising a modified AAV5 capsid protein VP1 with the mutation N679K.
[0127] AAV5-30Mut-GFP refers to a vector based on modified adeno-associated virus serotype 5 (rAAV5) comprising a modified AAV5 capsid protein VP1 with the mutation P723V.
[0128] AAV5-31Mut-GFP refers to a vector based on modified adeno-associated virus serotype 5 (rAAV5) comprising a modified AAV5 capsid protein VP1 with the mutation V431Y.
[0129] AAV5-32Mut-GFP refers to a vector based on modified adeno-associated virus serotype 5 (rAAV5) comprising a modified AAV5 capsid protein VP1 with the mutation A616D.
[0130] AAV5-33Mut-GFP refers to a vector based on modified adeno-associated virus serotype 5 (rAAV5) comprising a modified AAV5 capsid protein VP1 with the mutation W683R.
[0131] AAV5-34Mut-GFP refers to a vector based on modified adeno-associated virus serotype 5 (rAAV5) comprising a modified AAV5 capsid protein VP1 with the mutation S222A.
[0132] AAV5-35Mut-GFP refers to a vector based on modified adeno-associated virus serotype 5 (rAAV5) comprising a modified AAV5 capsid protein VP1 with the mutation R285L.
[0133] AAV5-36Mut-GFP refers to a vector based on modified adeno-associated virus serotype 5 (rAAV5) comprising a modified AAV5 capsid protein VP1 with the mutation Q340A.
[0134] AAV5-37Mut-GFP refers to a vector based on modified adeno-associated virus serotype 5 (rAAV5) comprising a modified AAV5 capsid protein VP1 with the mutation S420F.
[0135] AAV5-38Mut-GFP refers to a vector based on modified adeno-associated virus serotype 5 (rAAV5) comprising a modified AAV5 capsid protein VP1 with the mutation S680A.
[0136] AAV5-39Mut-GFP refers to a vector based on modified adeno-associated virus serotype 5 (rAAV5) comprising a modified AAV5 capsid protein VP1 with the mutation T721V.

[0137] FIG. 8 is a graph showing generation efficiency for vectors based on modified adeno-associated virus serotype 9 (rAAV9).
[0138] Vg/ml cf refers to viral genome count per milliliter of culture fluid.
[0139] AAV9-NullMut-GFP refers to a vector based on rAAV9 with a wild-type capsid protein VP1.
[0140] AAV9-01Mut-GFP refers to a vector based on modified adeno-associated virus serotype 9 (rAAV9) comprising a modified AAV9 capsid protein VP1 with the mutation S232T.
[0141] AAV9-02Mut-GFP refers to a vector based on modified adeno-associated virus serotype 9 (rAAV9) comprising a modified AAV9 capsid protein VP1 with the mutation D297E.
[0142] AAV9-03Mut-GFP refers to a vector based on modified adeno-associated virus serotype 9 (rAAV9) comprising a modified AAV9 capsid protein VP1 with the mutation Q351K.
[0143] AAV9-04Mut-GFP refers to a vector based on modified adeno-associated virus serotype 9 (rAAV9) comprising a modified AAV9 capsid protein VP1 with the mutation Q351R.
[0144] AAV9-05Mut-GFP refers to a vector based on modified adeno-associated virus serotype 9 (rAAV9) comprising a modified AAV9 capsid protein VP1 with the mutation C396V.
[0145] AAV9-06Mut-GFP refers to a vector based on modified adeno-associated virus serotype 9 (rAAV9) comprising a modified AAV9 capsid protein VP1 with the mutation D433Y.
[0146] AAV9-07Mut-GFP refers to a vector based on modified adeno-associated virus serotype 9 (rAAV9) comprising a modified AAV9 capsid protein VP1 with the mutation L444R.
[0147] AAV9-08Mut-GFP refers to a vector based on modified adeno-associated virus serotype 9 (rAAV9) comprising a modified AAV9 capsid protein VP1 with the mutation Y478F.
[0148] AAV9-09Mut-GFP refers to a vector based on modified adeno-associated virus serotype 9 (rAAV9) comprising a modified AAV9 capsid protein VP1 with the mutation G604N.
[0149] AAV9-10Mut-GFP refers to a vector based on modified adeno-associated virus serotype 9 (rAAV9) comprising a modified AAV9 capsid protein VP1 with the mutation G627K.
[0150] AAV9-11Mut-GFP refers to a vector based on modified adeno-associated virus serotype 9 (rAAV9) comprising a modified AAV9 capsid protein VP1 with the mutation T625L
[0151] AAV9-12Mut-GFP refers to a vector based on modified adeno-associated virus serotype 9 (rAAV9) comprising a modified AAV9 capsid protein VP1 with the mutation T625V.
[0152] AAV9-13Mut-GFP refers to a vector based on modified adeno-associated virus serotype 9 (rAAV9) comprising a modified AAV9 capsid protein VP1 with the mutation S692T.
[0153] AAV9-14Mut-GFP refers to a vector based on modified adeno-associated virus serotype 9 (rAAV9) comprising a modified AAV9 capsid protein VP1 with the mutation T733V.
[0154] AAV9-15Mut-GFP refers to a vector based on modified adeno-associated virus serotype 9 (rAAV9) comprising a modified AAV9 capsid protein VP1 with the mutation A427R.
[0155] AAV9-16Mut-GFP refers to a vector based on modified adeno-associated virus serotype 9 (rAAV9) comprising a modified AAV9 capsid protein VP1 with the mutation M635D.
[0156] AAV9-17Mut-GFP refers to a vector based on modified adeno-associated virus serotype 9 (rAAV9) comprising a modified AAV9 capsid protein VP1 with the mutation W695R.
[0157] AAV9-18Mut-GFP refers to a vector based on modified adeno-associated virus serotype 9 (rAAV9) comprising a modified AAV9 capsid protein VP1 with the mutation R296L.
[0158] AAV9-19Mut-GFP refers to a vector based on modified adeno-associated virus serotype 9 (rAAV9) comprising a modified AAV9 capsid protein VP1 with the mutation Q351A.
[0159] AAV9-20Mut-GFP refers to a vector based on modified adeno-associated virus serotype 9 (rAAV9) comprising a modified AAV9 capsid protein VP1 with the mutation Y395F.
[0160] AAV9-21Mut-GFP refers to a vector based on modified adeno-associated virus serotype 9 (rAAV9) comprising a modified AAV9 capsid protein VP1 with the mutation R434L.
[0161] AAV9-22Mut-GFP refers to a vector based on modified adeno-associated virus serotype 9 (rAAV9) comprising a modified AAV9 capsid protein VP1 with the mutation N691A.

[0162] FIG. 9 is a graph showing the efficiency of cell transduction with rAAV5-based products comprising point mutations in the wild-type rAAV5 capsid protein VP1 or in the rAAV5 capsid protein VP1 already comprising the mutations S2A and T711S.
[0163] AAV5-NullMut-GFP refers to a vector based on rAAV5 with a wild-type capsid protein VP1
[0164] AAV5-01Mut-GFP refers to a vector based on modified adeno-associated virus serotype 5 (rAAV5) comprising a modified AAV5 capsid protein VP1 with the mutations S2A and T711S.
[0165] AAV5-02Mut-GFP refers to a vector based on modified adeno-associated virus serotype 5 (rAAV5) comprising a modified AAV5 capsid protein VP1 with the mutations S2A, G226A and T711S.
[0166] AAV5-03Mut-GFP refers to a vector based on modified adeno-associated virus serotype 5 (rAAV5) comprising a modified AAV5 capsid protein VP1 with the mutations S2A, D286E and T711S.
[0167] AAV5-04Mut-GFP refers to a vector based on modified adeno-associated virus serotype 5 (rAAV5) comprising a modified AAV5 capsid protein VP1 with the mutations S2A, L341Y and T711S.
[0168] AAV5-05Mut-GFP refers to a vector based on modified adeno-associated virus serotype 5 (rAAV5) comprising a modified AAV5 capsid protein VP1 with the mutations S2A, C387V and T711S.
[0169] AAV5-06Mut-GFP refers to a vector based on modified adeno-associated virus serotype 5 (rAAV5) comprising a modified AAV5 capsid protein VP1 with the mutations S2A, Q421H and T711S.
[0170] AAV5-07Mut-GFP refers to a vector based on modified adeno-associated virus serotype 5 (rAAV5) comprising a modified AAV5 capsid protein VP1 with the mutations S2A, P466T and T711S.
[0171] AAV5-08Mut-GFP refers to a vector based on modified adeno-associated virus serotype 5 (rAAV5) comprising a modified AAV5 capsid protein VP1 with the mutations S2A, S594Q and T711S.
[0172] AAV5-09Mut-GFP refers to a vector based on modified adeno-associated virus serotype 5 (rAAV5) comprising a modified AAV5 capsid protein VP1 with the mutations S2A, T614L and T711S.
[0173] AAV5-10Mut-GFP refers to a vector based on modified adeno-associated virus serotype 5 (rAAV5) comprising a modified AAV5 capsid protein VP1 with the mutations S2A, N679K and T711S.
[0174] AAV5-11Mut-GFP refers to a vector based on modified adeno-associated virus serotype 5 (rAAV5) comprising a modified AAV5 capsid protein VP1 with the mutations S2A, P723V and T711S.
[0175] AAV5-12Mut-GFP refers to a vector based on modified adeno-associated virus serotype 5 (rAAV5) comprising a modified AAV5 capsid protein VP1 with the mutations S2A, V431Y and T711S.
[0176] AAV5-13Mut-GFP refers to a vector based on modified adeno-associated virus serotype 5 (rAAV5) comprising a modified AAV5 capsid protein VP1 with the mutations S2A, A616D and T711S.
[0177] AAV5-14Mut-GFP refers to a vector based on modified adeno-associated virus serotype 5 (rAAV5) comprising a modified AAV5 capsid protein VP1 with the mutations S2A, W683R and T711S.
[0178] AAV5-15Mut-GFP refers to a vector based on modified adeno-associated virus serotype 5 (rAAV5) comprising a modified AAV5 capsid protein VP1 with the mutations S2A, S222A and T711S.
[0179] AAV5-16Mut-GFP refers to a vector based on modified adeno-associated virus serotype 5 (rAAV5) comprising a modified AAV5 capsid protein VP1 with the mutations S2A, R285L and T711S.
[0180] AAV5-17Mut-GFP refers to a vector based on modified adeno-associated virus serotype 5 (rAAV5) comprising a modified AAV5 capsid protein VP1 with the mutations S2A, Q340A and T711S.
[0181] AAV5-18Mut-GFP refers to a vector based on modified adeno-associated virus serotype 5 (rAAV5) comprising a modified AAV5 capsid protein VP1 with the mutations S2A, S420F and T711S.
[0182] AAV5-19Mut-GFP refers to a vector based on modified adeno-associated virus serotype 5 (rAAV5) comprising a modified AAV5 capsid protein VP1 with the mutations S2A, S680A and T711S.
[0183] AAV5-20Mut-GFP refers to a vector based on modified adeno-associated virus serotype 5 (rAAV5) comprising a modified AAV5 capsid protein VP1 with the mutations S2A, T721V and T711S.

[0184] FIG. 10 is a graph showing cell transduction efficiency with rAAV5-based products comprising point mutations in the wild-type rAAV5 capsid protein VP1
[0185] AAV5-NullMut-GFP refers to a vector based on rAAV5 with a wild-type capsid protein VP1.
[0186] AAV5-01Mut-GFP refers to a vector based on modified adeno-associated virus serotype 5 (rAAV5) comprising a modified AAV5 capsid protein VP1 with the mutations S2A and T711S.
[0187] AAV5-21Mut-GFP refers to a vector based on modified adeno-associated virus serotype 5 (rAAV5) comprising a modified AAV5 capsid protein VP1 with the mutation G226A.
[0188] AAV5-22Mut-GFP refers to a vector based on modified adeno-associated virus serotype 5 (rAAV5) comprising a modified AAV5 capsid protein VP1 with the mutation D286E.
[0189] AAV5-23Mut-GFP refers to a vector based on modified adeno-associated virus serotype 5 (rAAV5) comprising a modified AAV5 capsid protein VP1 with the mutation L341Y.
[0190] AAV5-24Mut-GFP refers to a vector based on modified adeno-associated virus serotype 5 (rAAV5) comprising a modified AAV5 capsid protein VP1 with the mutation C387V
[0191] AAV5-25Mut-GFP refers to a vector based on modified adeno-associated virus serotype 5 (rAAV5) comprising a modified AAV5 capsid protein VP1 with the mutation Q421H.
[0192] AAV5-26Mut-GFP refers to a vector based on modified adeno-associated virus serotype 5 (rAAV5) comprising a modified AAV5 capsid protein VP1 with the mutation P466T.
[0193] AAV5-27Mut-GFP refers to a vector based on modified adeno-associated virus serotype 5 (rAAV5) comprising a modified AAV5 capsid protein VP1 with the mutation S594Q.
[0194] AAV5-28Mut-GFP refers to a vector based on modified adeno-associated virus serotype 5 (rAAV5) comprising a modified AAV5 capsid protein VP1 with the mutation T614L.
[0195] AAV5-29Mut-GFP refers to a vector based on modified adeno-associated virus serotype 5 (rAAV5) comprising a modified AAV5 capsid protein VP1 with the mutation N679K.
[0196] AAV5-30Mut-GFP refers to a vector based on modified adeno-associated virus serotype 5 (rAAV5) comprising a modified AAV5 capsid protein VP1 with the mutation P723V.
[0197] AAV5-31Mut-GFP refers to a vector based on modified adeno-associated virus serotype 5 (rAAV5) comprising a modified AAV5 capsid protein VP1 with the mutation V431Y.
[0198] AAV5-32Mut-GFP refers to a vector based on modified adeno-associated virus serotype 5 (rAAV5) comprising a modified AAV5 capsid protein VP1 with the mutation A616D.
[0199] AAV5-33Mut-GFP refers to a vector based on modified adeno-associated virus serotype 5 (rAAV5) comprising a modified AAV5 capsid protein VP1 with the mutation W683R.
[0200] AAV5-34Mut-GFP refers to a vector based on modified adeno-associated virus serotype 5 (rAAV5) comprising a modified AAV5 capsid protein VP1 with the mutation S222A.
[0201] AAV5-35Mut-GFP refers to a vector based on modified adeno-associated virus serotype 5 (rAAV5) comprising a modified AAV5 capsid protein VP1 with the mutation R285L.
[0202] AAV5-36Mut-GFP refers to a vector based on modified adeno-associated virus serotype 5 (rAAV5) comprising a modified AAV5 capsid protein VP1 with the mutation Q340A.
[0203] AAV5-37Mut-GFP refers to a vector based on modified adeno-associated virus serotype 5 (rAAV5) comprising a modified AAV5 capsid protein VP1 with the mutation S420F.
[0204] AAV5-38Mut-GFP refers to a vector based on modified adeno-associated virus serotype 5 (rAAV5) comprising a modified AAV5 capsid protein VP1 with the mutation S680A.
[0205] AAV5-39Mut-GFP refers to a vector based on modified adeno-associated virus serotype 5 (rAAV5) comprising a modified AAV5 capsid protein VP1 with the mutation T721V.

[0206] FIG. 11 is a graph showing cell transduction efficiency by rAAV9-based products comprising point mutations in the wild-type rAAV9 capsid protein VP1.
[0207] AAV9-NullMut-GFP refers to a vector based on rAAV9 with a wild-type capsid protein VP1.
[0208] AAV9-01Mut-GFP refers to a vector based on modified adeno-associated virus serotype 9 (rAAV9) comprising a modified AAV9 capsid protein VP1 with the mutation S232T.
[0209] AAV9-02Mut-GFP refers to a vector based on modified adeno-associated virus serotype 9 (rAAV9) comprising a modified AAV9 capsid protein VP1 with the mutation D297E.
[0210] AAV9-03Mut-GFP refers to a vector based on modified adeno-associated virus serotype 9 (rAAV9) comprising a modified AAV9 capsid protein VP1 with the mutation Q351K.
[0211] AAV9-04Mut-GFP refers to a vector based on modified adeno-associated virus serotype 9 (rAAV9) comprising a modified AAV9 capsid protein VP1 with the mutation Q351R.
[0212] AAV9-05Mut-GFP refers to a vector based on modified adeno-associated virus serotype 9 (rAAV9) comprising a modified AAV9 capsid protein VP1 with the mutation C396V.
[0213] AAV9-06Mut-GFP refers to a vector based on modified adeno-associated virus serotype 9 (rAAV9) comprising a modified AAV9 capsid protein VP1 with the mutation D433Y.
[0214] AAV9-07Mut-GFP refers to a vector based on modified adeno-associated virus serotype 9 (rAAV9) comprising a modified AAV9 capsid protein VP1 with the mutation L444R.
[0215] AAV9-08Mut-GFP refers to a vector based on modified adeno-associated virus serotype 9 (rAAV9) comprising a modified AAV9 capsid protein VP1 with the mutation Y478F.
[0216] AAV9-09Mut-GFP refers to a vector based on modified adeno-associated virus serotype 9 (rAAV9) comprising a modified AAV9 capsid protein VP1 with the mutation G604N.
[0217] AAV9-10Mut-GFP refers to a vector based on modified adeno-associated virus serotype 9 (rAAV9) comprising a modified AAV9 capsid protein VP1 with the mutation G627K.
[0218] AAV9-11Mut-GFP refers to a vector based on modified adeno-associated virus serotype 9 (rAAV9) comprising a modified AAV9 capsid protein VP1 with the mutation T625L.
[0219] AAV9-12Mut-GFP refers to a vector based on modified adeno-associated virus serotype 9 (rAAV9) comprising a modified AAV9 capsid protein VP1 with the mutation T625V.
[0220] AAV9-13Mut-GFP refers to a vector based on modified adeno-associated virus serotype 9 (rAAV9) comprising a modified AAV9 capsid protein VP1 with the mutation S692T.
[0221] AAV9-14Mut-GFP refers to a vector based on modified adeno-associated virus serotype 9 (rAAV9) comprising a modified AAV9 capsid protein VP1 with the mutation T733V.
[0222] AAV9-15Mut-GFP refers to a vector based on modified adeno-associated virus serotype 9 (rAAV9) comprising a modified AAV9 capsid protein VP1 with the mutation A427R.
[0223] AAV9-16Mut-GFP refers to a vector based on modified adeno-associated virus serotype 9 (rAAV9) comprising a modified AAV9 capsid protein VP1 with the mutation M635D.
[0224] AAV9-17Mut-GFP refers to a vector based on modified adeno-associated virus serotype 9 (rAAV9) comprising a modified AAV9 capsid protein VP1 with the mutation W695R.
[0225] AAV9-18Mut-GFP refers to a vector based on modified adeno-associated virus serotype 9 (rAAV9) comprising a modified AAV9 capsid protein VP1 with the mutation R296L.
[0226] AAV9-19Mut-GFP refers to a vector based on modified adeno-associated virus serotype 9 (rAAV9) comprising a modified AAV9 capsid protein VP1 with the mutation Q351A.
[0227] AAV9-20Mut-GFP refers to a vector based on modified adeno-associated virus serotype 9 (rAAV9) comprising a modified AAV9 capsid protein VP1 with the mutation Y395F.
[0228] AAV9-21Mut-GFP refers to a vector based on modified adeno-associated virus serotype 9 (rAAV9) comprising a modified AAV9 capsid protein VP1 with the mutation R434L.
[0229] AAV9-22Mut-GFP refers to a vector based on modified adeno-associated virus serotype 9 (rAAV9) comprising a modified AAV9 capsid protein VP1 with the mutation N691A.

[0230] FIG. 12 is a graph showing the efficiency of production of target protein encoded by transgene following cell transduction with rAAV5-based products comprising single mutations in wild-type rAAV5 capsid protein VP1 or in rAAV5 capsid protein VP1 already comprising the mutations S2A and T711S.
[0231] AAV5-NullMut-FIX refers to a vector based on rAAV5 with a wild-type capsid protein VP1.
[0232] AAV5-01Mut-FIX refers to a vector based on modified adeno-associated virus serotype 5 (rAAV5) comprising a modified AAV5 capsid protein VP1 with the mutations S2A and T711S.
[0233] AAV5-02Mut-FIX refers to a vector based on modified adeno-associated virus serotype 5 (rAAV5) comprising a modified AAV5 capsid protein VP1 with the mutations S2A, G226A and T711S.
[0234] AAV5-03Mut-FIX refers to a vector based on modified adeno-associated virus serotype 5 (rAAV5) comprising a modified AAV5 capsid protein VP1 with the mutations S2A, D286E and T711S.
[0235] AAV5-04Mut-FIX refers to a vector based on modified adeno-associated virus serotype 5 (rAAV5) comprising a modified AAV5 capsid protein VP1 with the mutations S2A, L341Y and T711S.
[0236] AAV5-05Mut-FIX refers to a vector based on modified adeno-associated virus serotype 5 (rAAV5) comprising a modified AAV5 capsid protein VP1 with the mutations S2A, C387V and T711S
[0237] AAV5-06Mut-FIX refers to a vector based on modified adeno-associated virus serotype 5 (rAAV5) comprising a modified AAV5 capsid protein VP1 with the mutations S2A, Q421H and T711S.
[0238] AAV5-07Mut-FIX refers to a vector based on modified adeno-associated virus serotype 5 (rAAV5) comprising a modified AAV5 capsid protein VP1 with the mutations S2A, P466T and T711S.
[0239] AAV5-08Mut-FIX refers to a vector based on modified adeno-associated virus serotype 5 (rAAV5) comprising a modified AAV5 capsid protein VP1 with the mutations S2A, S594Q and T711S.
[0240] AAV5-09Mut-FIX refers to a vector based on modified adeno-associated virus serotype 5 (rAAV5) comprising a modified AAV5 capsid protein VP1 with the mutations S2A, T614L and T711S.
[0241] AAV5-10Mut-FIX refers to a vector based on modified adeno-associated virus serotype 5 (rAAV5) comprising a modified AAV5 capsid protein VP1 with the mutations S2A, N679K and T711S.
[0242] AAV5-11Mut-FIX refers to a vector based on modified adeno-associated virus serotype 5 (rAAV5) comprising a modified AAV5 capsid protein VP1 with the mutations S2A, P723V and T711S.
[0243] AAV5-12Mut-FIX refers to a vector based on modified adeno-associated virus serotype 5 (rAAV5) comprising a modified AAV5 capsid protein VP1 with the mutations S2A, V431Y and T711S.
[0244] AAV5-13Mut-FIX refers to a vector based on modified adeno-associated virus serotype 5 (rAAV5) comprising a modified AAV5 capsid protein VP1 with the mutations S2A, A616D and T711S.
[0245] AAV5-14Mut-FIX refers to a vector based on modified adeno-associated virus serotype 5 (rAAV5) comprising a modified AAV5 capsid protein VP1 with the mutations S2A, W683R and T711S.
[0246] AAV5-15Mut-FIX refers to a vector based on modified adeno-associated virus serotype 5 (rAAV5) comprising a modified AAV5 capsid protein VP1 with the mutations S2A, S222A and T711S.
[0247] AAV5-16Mut-FIX refers to a vector based on modified adeno-associated virus serotype 5 (rAAV5) comprising a modified AAV5 capsid protein VP1 with the mutations S2A, R285L and T711S.
[0248] AAV5-17Mut-FIX refers to a vector based on modified adeno-associated virus serotype 5 (rAAV5) comprising a modified AAV5 capsid protein VP1 with the mutations S2A, Q340A and T711S.
[0249] AAV5-18Mut-FIX refers to a vector based on modified adeno-associated virus serotype 5 (rAAV5) comprising a modified AAV5 capsid protein VP1 with the mutations S2A, S420F and T711S
[0250] AAV5-19Mut-FIX refers to a vector based on modified adeno-associated virus serotype 5 (rAAV5) comprising a modified AAV5 capsid protein VP1 with the mutations S2A, S680A and T711S.
[0251] AAV5-20Mut-FIX refers to a vector based on modified adeno-associated virus serotype 5 (rAAV5) comprising a modified AAV5 capsid protein VP1 with the mutations S2A, T721V and T711S.

[0252] FIG. 13 is a graph showing the efficiency of the production of the target protein encoded by the transgene following cell transduction with rAAV5-based products comprising single mutations in the wild-type rAAV5 capsid protein VP1.
[0253] AAV5-NullMut-FIX refers to a vector based on rAAV5 with a wild-type capsid protein VP1.
[0254] AAV5-01Mut-FIX refers to a vector based on modified adeno-associated virus serotype 5 (rAAV5) comprising a modified AAV5 capsid protein VP1 with the mutations S2A and T711S.
[0255] AAV5-21Mut-FIX refers to a vector based on modified adeno-associated virus serotype 5 (rAAV5) comprising a modified AAV5 capsid protein VP1 with the mutation G226A.
[0256] AAV5-22Mut-FIX refers to a vector based on modified adeno-associated virus serotype 5 (rAAV5) comprising a modified AAV5 capsid protein VP1 with the mutation D286E.
[0257] AAV5-23Mut-FIX refers to a vector based on modified adeno-associated virus serotype 5 (rAAV5) comprising a modified AAV5 capsid protein VP1 with the mutation L341Y.
[0258] AAV5-24Mut-FIX refers to a vector based on modified adeno-associated virus serotype 5 (rAAV5) comprising a modified AAV5 capsid protein VP1 with the mutation C387V.
[0259] AAV5-25Mut-FIX refers to a vector based on modified adeno-associated virus serotype 5 (rAAV5) comprising a modified AAV5 capsid protein VP1 with the mutation Q421H.
[0260] AAV5-26Mut-FIX refers to a vector based on modified adeno-associated virus serotype 5 (rAAV5) comprising a modified AAV5 capsid protein VP1 with the mutation P466T.
[0261] AAV5-27Mut-FIX refers to a vector based on modified adeno-associated virus serotype 5 (rAAV5) comprising a modified AAV5 capsid protein VP1 with the mutation S594Q.
[0262] AAV5-28Mut-FIX refers to a vector based on modified adeno-associated virus serotype 5 (rAAV5) comprising a modified AAV5 capsid protein VP1 with the mutation T614L.
[0263] AAV5-29Mut-FIX refers to a vector based on modified adeno-associated virus serotype 5 (rAAV5) comprising a modified AAV5 capsid protein VP1 with the mutation N679K.
[0264] AAV5-30Mut-FIX refers to a vector based on modified adeno-associated virus serotype 5 (rAAV5) comprising a modified AAV5 capsid protein VP1 with the mutation P723V.
[0265] AAV5-31Mut-FIX refers to a vector based on modified adeno-associated virus serotype 5 (rAAV5) comprising a modified AAV5 capsid protein VP1 with the mutation V431Y.
[0266] AAV5-32Mut-FIX refers to a vector based on modified adeno-associated virus serotype 5 (rAAV5) comprising a modified AAV5 capsid protein VP1 with the mutation A616D.
[0267] AAV5-33Mut-FIX refers to a vector based on modified adeno-associated virus serotype 5 (rAAV5) comprising a modified AAV5 capsid protein VP1 with the mutation W683R.
[0268] AAV5-34Mut-FIX refers to a vector based on modified adeno-associated virus serotype 5 (rAAV5) comprising a modified AAV5 capsid protein VP1 with the mutation S222A.
[0269] AAV5-35Mut-FIX refers to a vector based on modified adeno-associated virus serotype 5 (rAAV5) comprising a modified AAV5 capsid protein VP1 with the mutation R285L.
[0270] AAV5-36Mut-FIX refers to a vector based on modified adeno-associated virus serotype 5 (rAAV5) comprising a modified AAV5 capsid protein VP1 with the mutation Q340A.
[0271] AAV5-37Mut-FIX refers to a vector based on modified adeno-associated virus serotype 5 (rAAV5) comprising a modified AAV5 capsid protein VP1 with the mutation S420F.
[0272] AAV5-38Mut-FIX refers to a vector based on modified adeno-associated virus serotype 5 (rAAV5) comprising a modified AAV5 capsid protein VP1 with the mutation S680A.
[0273] AAV5-39Mut-FIX refers to a vector based on modified adeno-associated virus serotype 5 (rAAV5) comprising a modified AAV5 capsid protein VP1 with the mutation T721V.

[0274] FIG. 14 is a graph showing the efficiency of the production of the target protein encoded by the transgene following cell transduction with rAAV9-based products comprising mutations in the wild-type rAAV9 capsid protein VP1
[0275] AAV9-NullMut-FIX refers to a vector based on rAAV9 with a wild-type capsid protein VP1
[0276] AAV9-01Mut-FIX refers to a vector based on modified adeno-associated virus serotype 9 (rAAV9) comprising a modified AAV9 capsid protein VP1 with the mutation S232T.
[0277] AAV9-02Mut-FIX refers to a vector based on modified adeno-associated virus serotype 9 (rAAV9) comprising a modified AAV9 capsid protein VP1 with the mutation D297E.
[0278] AAV9-03Mut-FIX refers to a vector based on modified adeno-associated virus serotype 9 (rAAV9) comprising a modified AAV9 capsid protein VP1 with the mutation Q351K.
[0279] AAV9-04Mut-FIX refers to a vector based on modified adeno-associated virus serotype 9 (rAAV9) comprising a modified AAV9 capsid protein VP1 with the mutation Q351R.
[0280] AAV9-05Mut-FIX refers to a vector based on modified adeno-associated virus serotype 9 (rAAV9) comprising a modified AAV9 capsid protein VP1 with the mutation C396V.
[0281] AAV9-06Mut-FIX refers to a vector based on modified adeno-associated virus serotype 9 (rAAV9) comprising a modified AAV9 capsid protein VP1 with the mutation D433Y.
[0282] AAV9-07Mut-FIX refers to a vector based on modified adeno-associated virus serotype 9 (rAAV9) comprising a modified AAV9 capsid protein VP1 with the mutation L444R.
[0283] AAV9-08Mut-FIX refers to a vector based on modified adeno-associated virus serotype 9 (rAAV9) comprising a modified AAV9 capsid protein VP1 with the mutation Y478F.
[0284] AAV9-09Mut-FIX refers to a vector based on modified adeno-associated virus serotype 9 (rAAV9) comprising a modified AAV9 capsid protein VP1 with the mutation G604N.
[0285] AAV9-10Mut-FIX refers to a vector based on modified adeno-associated virus serotype 9 (rAAV9) comprising a modified AAV9 capsid protein VP1 with the mutation G627K.
[0286] AAV9-11Mut-FIX refers to a vector based on modified adeno-associated virus serotype 9 (rAAV9) comprising a modified AAV9 capsid protein VP1 with the mutation T625L
[0287] AAV9-12Mut-FIX refers to a vector based on modified adeno-associated virus serotype 9 (rAAV9) comprising a modified AAV9 capsid protein VP1 with the mutation T625V.
[0288] AAV9-13Mut-FIX refers to a vector based on modified adeno-associated virus serotype 9 (rAAV9) comprising a modified AAV9 capsid protein VP1 with the mutation S692T
[0289] AAV9-14Mut-FIX refers to a vector based on modified adeno-associated virus serotype 9 (rAAV9) comprising a modified AAV9 capsid protein VP1 with the mutation T733V.
[0290] AAV9-15Mut-FIX refers to a vector based on modified adeno-associated virus serotype 9 (rAAV9) comprising a modified AAV9 capsid protein VP1 with the mutation A427R.
[0291] AAV9-16Mut-FIX refers to a vector based on modified adeno-associated virus serotype 9 (rAAV9) comprising a modified AAV9 capsid protein VP1 with the mutation M635D.
[0292] AAV9-17Mut-FIX refers to a vector based on modified adeno-associated virus serotype 9 (rAAV9) comprising a modified AAV9 capsid protein VP1 with the mutation W695R.
[0293] AAV9-18Mut-FIX refers to a vector based on modified adeno-associated virus serotype 9 (rAAV9) comprising a modified AAV9 capsid protein VP1 with the mutation R296L.
[0294] AAV9-19Mut-FIX refers to a vector based on modified adeno-associated virus serotype 9 (rAAV9) comprising a modified AAV9 capsid protein VP1 with the mutation Q351A.
[0295] AAV9-20Mut-FIX refers to a vector based on modified adeno-associated virus serotype 9 (rAAV9) comprising a modified AAV9 capsid protein VP1 with the mutation Y395F.
[0296] AAV9-21Mut-FIX refers to a vector based on modified adeno-associated virus serotype 9 (rAAV9) comprising a modified AAV9 capsid protein VP1 with the mutation R434L.
[0297] AAV9-22Mut-FIX refers to a vector based on modified adeno-associated virus serotype 9 (rAAV9) comprising a modified AAV9 capsid protein VP1 with the mutation N691A.

### DEFINITIONS AND GENERAL METHODS

[0298] Unless defined otherwise herein, all technical and scientific terms used in connection with the present invention will have the same meaning as is commonly understood by those skilled in the art.

[0299] Furthermore, unless otherwise required by context, singular terms shall include plural terms, and the plural terms shall include the singular terms. Typically, the present classification and methods of cell culture, molecular biology, immunology, microbiology, genetics, analytical chemistry, organic synthesis chemistry, medical and pharmaceutical chemistry, as well as hybridization and chemistry of protein and nucleic acids described herein are well known by those skilled and widely used in the art. Enzyme reactions and purification methods are performed according to the manufacturer's guidelines, as is common in the art, or as described herein.

[0300] The terms “naturally occurring”, “native”, or “wild-type” are used to describe an object that can be found in nature as distinct from being artificially produced. For example, a protein or nucleotide sequence present in an organism (including a virus), which can be isolated from a source in nature and that has not been intentionally modified by a person in the laboratory, is naturally occurring.

[0301] As used in the present description and claims that follow, unless otherwise dictated by the context, the words “include” and “comprise”, or variations thereof such as “includes”, “including”, “comprises”, or “comprising”, will be understood to imply the inclusion of a stated integer or group of integers but not the exclusion of any other integer or group of integers.

### Adeno-Associated Virus (AAV)

[0302] Viruses of the family Parvoviridae are small DNA-containing animal viruses. The Parvoviridae family may be divided into two subfamilies: the Parvovirinae, which members infect vertebrates, and the Densovirinae, which members infect insects. By 2006, there have been 11 serotypes of adeno-associated virus described (Mori, S. ET AL., 2004, “Two novel adeno-associated viruses from cynomolgus monkey: pseudotyping characterization of capsid protein”, Virology, T. 330 (2): 375-83). Serotype 12 of the adeno-associated virus was described in 2008 (Michael Schmidt ET AL., Adeno-associated virus type 12 (AAV12): a novel AAV serotype with sialic acid- and heparan sulfate proteoglycan-independent transduction activity, J Virol. 2008 February; 82 (3): 1399-406. doi: 10.1128/JVI.02012-07). All of the known serotypes can infect cells from multiple tissue types. Tissue specificity is determined by the capsid protein serotype; therefore, the adeno-associated virus-based vectors are constructed by assigning the desired serotype. Further information on parvoviruses and other members of the Parvoviridae has been described in the literature (Kenneth I. Berns, «Parvoviridae: The Viruses and Their Replication», Chapter 69 in Fields Virology (3d Ed. 1996)).

[0303] The genomic organization of all known AAV serotypes is very similar. The genome of AAV is a linear, single-stranded DNA molecule that is less than about 5000 nucleotides (nt) in length. Inverted terminal repeats (ITR) flank unique coding nucleotide sequences of proteins (Rep) that are essential for the virus life cycle, as well as sequences of overlapping capsid proteins (Cap). The Cap gene encodes VP proteins (VP1, VP2 and VP3), which form a capsid, as well as AAP (protein activating adeno-associated virus (AAV) assembly (Sonntag F, Köthe K, Schmidt K, et al. The assembly-activating protein promotes capsid assembly of different adeno-associated virus serotypes. J Virol. 2011; 85 (23): 12686-12697. doi: 10.1128/JVI.05359-11) and MAAP (membrane-associated accessory protein (Ogden P J, Kelsic E D, Sinai S, Church G M. Comprehensive AAV capsid fitness landscape reveals a viral gene and enables machine-guided design. Science. 2019; 366 (6469): 1139-1143. doi: 10.1126/science.aaw2900). The AAV genome flanking sequences which are 145 nucleotides long are self-complementary and are organized such that an energetically stable intramolecular duplex forming a T-shaped hairpin may be formed. Such hairpin structures function as an origin for virus DNA replication, serving as primers for the cellular DNA polymerase complex. Following wild-type AAV (wtAAV) infection in mammalian cells, the Rep genes (e.g. Rep78 and Rep52) are expressed using the P5 promoter and the P19 promoter, respectively, and the both Rep proteins have a certain function in the replication of the viral genome. A splicing event in the Rep open reading frame (Rep ORF) results in the expression of actually four Rep proteins (e.g. Rep78, Rep68, Rep52, and Rep40). However, it has been shown that the unspliced mRNA encoding Rep78 and Rep52 proteins is sufficient for AAV vector production in mammalian cells.

Recombinant Adeno-Associated Virus (rAAV)-Based Vector

[0304] The term “vector” as used herein means a nucleic acid molecule capable of transporting another nucleic acid to which it has been linked. Furthermore, the term “vector” herein refers to a viral particle capable of transporting a nucleic acid.

[0305] As used in the present description, the term “expression” is defined as the transcription and/or translation of a particular nucleotide sequence driven by its promoter.

### Use

[0306] “Delivering to a subject a heterologous nucleic acid sequence” is the insertion of genes into the cells and/or tissues of the subject.

[0307] The terms “subject”, “patient”, “individual”, and the like are used interchangeably in the present description, and they refer to any animal which is amenable to the methods described in the present description. In certain non-limiting embodiments, the subject, patient or individual is a human. Said subject may be either male or female, of any age.

### DETAILED DESCRIPTION OF THE INVENTION

### Method for Producing Modified Adeno-Associated Virus Capsid

[0308] In one aspect, the present invention relates to a method for producing a modified AAV capsid, comprising:
[0309] a) determining amino acids in capsomere protein of the modified AAV, which are located in the interaction interface region of adjacent pentameric subunits of the capsid;
[0310] b) aligning structurally the modified AAV capsid to the template capsid to determine the pairwise correspondence between each amino acid of the modified AAV from the interaction interface region between adjacent pentameric subunits and the amino acid closest thereto of the template capsid, as a structural analogue of the initial amino acid that is considered a potential substitution, wherein the template capsid is understood to mean a structurally similar capsid of a virus selected from the family Parvoviridae, which is other than AAV;
[0311] c) comparing pairwisely amino acid residues, determined in step b), of the AAV capsid and the template capsid to identify structural differences between the modified AAV capsid and the template capsid in the interaction interface region of adjacent pentameric subunits of the capsid;
[0312] d) selecting positions for mutagenesis, wherein the amino acid residues for mutagenesis are located in the interaction interface region of adjacent pentameric subunits of the modified AAV capsid and have a structural difference between the modified AAV capsid and the template capsid in the interaction interface region of adjacent pentameric subunits of the capsid;
[0313] e) selecting an amino acid residue for mutagenesis at position selected in step d) using one of the following principles:
   [0314] substitution of the initial amino acid in the capsomere protein of the modified AAV for an amino acid that has a greater volume, other than cysteine and methionine;
   [0315] substitution of the initial amino acid in the capsomere protein of the modified AAV for an amino acid that has an increased or decreased number of polar contacts between the capsomeres, other than cysteine and methionine;
[0316] f) introducing one or more amino acid substitutions selected in steps d)-e) in the interaction interface region of adjacent pentameric subunits of the modified AAV capsid.

[0317] Interaction interface (or surface) refers to a set of capsomere protein polypeptide chain fragments interacting with the amino acids of an adjacent pentameric subunit, wherein the pentameric subunit refers to a capsid structural element having the shape of a regular pentagon and consisting of 5 capsomere proteins located around the central pore (L. M. Drouin and M. Agbandje-McKenna. Adeno-associated virus structural biology as a tool in vector development. Future Virol., vol. 8, no. 12, pp. 1183-1199, 2013).

[0318] Interaction interface for a given subunit is intended to refer to all amino acids, at least one atom of which is present at distance lower than 5 Å from any atom of adjacent pentameric subunits.

[0319] For AAV5, the calculation was made based on the capsid structure PDB ID: 6JCT.

[0320] According to the calculation, its interaction interface between adjacent pentameric AAV5 subunits includes the following ranges of AAV5 capsid protein VP1 residues: 220-226, 283-293, 339-342, 385-392, 412-435, 462-466, 590-598, 611-626, 677-685, 721-724.

[0321] For AAV9, a similar calculation was made based on the structure PDB ID: 3UX1.

[0322] According to the calculation, its interaction interface between adjacent pentameric subunits of AAV9 includes the following ranges of AAV9 capsid protein VP1 residues: 230-236, 294-304, 350-353, 394-401, 421-444, 476-480, 601-609, 622-637, 689-697, 733-736.

[0323] “One or more amino acid substitutions” refers to one, two, three, four, five, six, seven, eight, nine or ten amino acid substitutions. For example, from 1 to 10 amino acid substitutions, from 1 to 9 amino acid substitutions, from 1 to 8 amino acid substitutions, from 1 to 7 amino acid substitutions, from 1 to 6 amino acid substitutions, from 1 to 5 amino acid substitutions, from 1 to 4 amino acid substitutions, from 1 to 3 amino acid substitutions or from 1 to 2 amino acid substitutions.

[0324] In some embodiments of the invention, the method for producing a modified AAV capsid further comprises checking the modified AAV capsids produced in step f) with one or more amino acid substitutions for the presence of one or more improved properties as compared to AAV capsid free of these modifications, wherein the one or more improved properties are selected from the group:
[0325] increased efficiency of cell transduction,
[0326] increased production of target protein,
[0327] increased efficiency of generation due to highly efficient production (assembly) of encapsidated viral vectors based on recombinant adeno-associated virus (rAAV).

[0328] In some embodiments of the invention, the method for producing a modified AAV capsid further comprises checking the modified AAV capsids produced in step f) for the presence of one or more improved properties as compared to AAV capsid free of these modifications and selecting modified AAV capsids that have one or more improved properties as compared to AAV capsid free of these modifications, wherein the one or more improved properties are selected from the group:
[0329] increased efficiency of cell transduction,
[0330] increased production of target protein,
[0331] increased efficiency of generation due to highly efficient production (assembly) of encapsidated viral vectors based on recombinant adeno-associated virus (rAAV).

[0332] In some embodiments of the method for producing an AAV capsid, the modified AAV capsid is selected from the group comprising: human AAV, simian AAV, or avian AAV.

[0333] In some embodiments of the method for producing an AAV capsid, the modified AAV capsid is selected from the group comprising the following AAV serotypes: AAV1, AAV2, AAV3, AAV4, AAV5, AAV6, AAV7, AAV8, AAV9, AAV10 AAV11, AAV12, AAV13, AAV14, AAV15, AAV16, rAAV.rh8, rAAV.rhlO, rAAV.rh20, rAAV.rh39, rAAV.Rh74, rAAV.RHM4-1, AAV.hu37, rAAV.Anc80, rAAV.Anc80L65, rAAV.7m8, rAAV.PHP.B, rAAV2.5, rAAV2tYF, rAAV3B, rAAV.LK03, AAV.HSC1, AAV.HSC2, AAV.HSC3, AAV.HSC4, AAV.HSC5, AAV.HSC6, AAV.HSC7, AAV.HSC8, AAV.HSC9, AAV.HSC10, AAV.HSC11, AAV.HSC12, AAV.HSC13, AAV.HSC14, AAV.HSC15 or AAV.HSC16.

[0334] In some embodiments of the method for producing an AAV capsid, the modified AAV capsid may be a wild-type AAV capsid or an AAV capsid comprising one or more amino acid substitutions in proteins VP1, VP2 and/or VP3.

[0335] In some embodiments of the method for producing an AAV capsid, the modified AAV capsid may be a wild-type AAV5 capsid or an AAV5 capsid comprising one or more amino acid substitutions in proteins VP1, VP2 and/or VP3.

[0336] In some embodiments of the method for producing an AAV capsid, the modified AAV capsid may be an AAV5 capsid comprising the amino acid substitutions S2A and T711S in the protein VP1.

[0337] In some embodiments of the method for producing an AAV capsid, the modified AAV capsid may be a wild-type AAV9 capsid or an AAV9 capsid comprising one or more amino acid substitutions in proteins VP1, VP2 and/or VP3.

[0338] In some embodiments of the method for producing an AAV capsid, the structurally similar template capsid is selected from the group comprising: parvovirus B19, human bocavirus 1 (HBoV1), bovine parvovirus (BVP).

### Modified AAV Capsid According to the Invention

[0339] In one aspect, the present invention relates to a modified AAV capsid for producing viral vectors based on recombinant adeno-associated virus produced by a method comprising:
[0340] a) determining amino acids in capsomere protein of the modified AAV, which are located in the interaction interface region of adjacent pentameric subunits of the capsid;
[0341] b) aligning structurally the modified AAV capsid to the template capsid to determine the pairwise correspondence between each amino acid of the modified AAV from the interaction interface region between adjacent pentameric subunits and the amino acid closest thereto of the template capsid, as a structural analogue of the initial amino acid that is considered a potential substitution,
[0342] wherein the template capsid is understood to mean a structurally similar capsid of a virus selected from the family Parvoviridae, which is other than AAV;
[0343] c) comparing pairwisely amino acid residues, determined in step b), of the AAV capsid and the template capsid to identify structural differences between the modified AAV capsid and the template capsid in the interaction interface region of adjacent pentameric subunits of the capsid;
[0344] d) selecting positions for mutagenesis, wherein the amino acid residues for mutagenesis are located in the interaction interface region of adjacent pentameric subunits of the modified AAV capsid and have a structural difference between the modified AAV capsid and the template capsid in the interaction interface region of adjacent pentameric subunits of the capsid;
[0345] e) selecting an amino acid residue for mutagenesis at position selected in step d) using one of the following principles:
   [0346] substitution of the initial amino acid in the capsomere protein of the modified AAV for an amino acid that has a greater volume, other than cysteine and methionine;
   [0347] substitution of the initial amino acid in the capsomere protein of the modified AAV for an amino acid that has an increased or decreased number of polar contacts between the capsomeres, other than cysteine and methionine;
[0348] f) introducing one or more amino acid substitutions selected in steps d)-e) in the interaction interface region of adjacent pentameric subunits of the modified AAV capsid;
[0349] and, if necessary, further comprising
[0350] g) checking the modified AAV capsids produced in step f) for the presence of one or more improved properties as compared to AAV capsid free of these modifications and selecting modified AAV capsids that have one or more improved properties as compared to AAV capsid free of these modifications, wherein the one or more improved properties are selected from the group:
   [0351] increased efficiency of cell transduction,
   [0352] increased production of target protein,
   [0353] increased efficiency of generation due to highly efficient production (assembly) of encapsidated viral vectors based on recombinant adeno-associated virus (rAAV).

[0354] In some embodiments of the modified AAV capsid, the modified AAV capsid is selected from the group comprising: human AAV, simian AAV, or avian AAV.

[0355] In some embodiments of the modified AAV capsid, the modified AAV capsid is selected from the group comprising the following AAV serotypes: AAV: AAV1, AAV2, AAV3, AAV4, AAV5, AAV6, AAV7, AAV8, AAV9, AAV10 AAV11, AAV12, AAV13, AAV14, AAV15, AAV16, rAAV.rh8, rAAV.rhlO, rAAV.rh20, rAAV.rh39, rAAV.Rh74, rAAV.RHM4-1, AAV.hu37, rAAV.Anc80, rAAV.Anc80L65, rAAV.7m8, rAAV.PHP.B, rAAV2.5, rAAV2tYF, rAAV3B, rAAV.LK03, AAV.HSC1, AAV.HSC2, AAV.HSC3, AAV.HSC4, AAV.HSC5, AAV.HSC6, AAV.HSC7, AAV.HSC8, AAV.HSC9, AAV.HSC10, AAV.HSC11, AAV.HSC12, AAV.HSC13, AAV.HSC14, AAV.HSC15 or AAV.HSC16.

[0356] In some embodiments of the modified AAV capsid, the modified AAV capsid may be a wild-type AAV capsid or an AAV capsid comprising one or more amino acid substitutions in proteins VP1, VP2 and/or VP3.

[0357] In some embodiments of the modified AAV capsid, the modified AAV capsid may be a wild-type AAV5 capsid or an AAV5 capsid comprising one or more amino acid substitutions in proteins VP1, VP2 and/or VP3.

[0358] In some embodiments of the modified AAV capsid, the modified AAV capsid may be an AAV5 capsid comprising the amino acid substitutions S2A and T711S in the protein VP1.

[0359] In some embodiments of the modified AAV capsid, the modified AAV capsid may be a wild-type AAV9 capsid or an AAV9 capsid comprising one or more amino acid substitutions in proteins VP1, VP2 and/or VP3.

[0360] The “right-hand side” of a (+)-chain of genomic DNA of adeno-associated virus comprises overlapping sequences encoding three capsid proteins: VP1, VP2 and VP3. Transcription of these genes starts from a single promoter, p40. The molecular weights of the corresponding proteins are 87, 72, and 62 kDa, respectively. All of the three proteins are translated from a single mRNA. Following transcription, pre-mRNA can be spliced in two different manners, where either longer or shorter intron is excised to form mRNAs of 2300 or 2600 nucleotide long.

[0361] Thus, the introduction of mutations into the Cap gene will affect not only the AAV capsid protein VP1, but also the AAV VP2 and VP3 capsid proteins.

[0362] Below are the positions of AAV5 capsid structural proteins in the Cap AAV5 gene sequence:
[0363] 1-725 aa-VP1,
[0364] 137-725 aa-VP2,
[0365] 193-725 aa-VP3.

[0366] Below are the positions of AAV9 capsid structural proteins in the Cap AAV9 gene sequence:
[0367] 1-737 aa-VP1,
[0368] 138-737 aa-VP2,
[0369] 203-737 aa-VP3.

[0370] In some embodiments of the invention, the modified AAV capsid includes a modified AAV capsid protein VP1 having an amino acid sequence selected from the group: SEQ ID No: 14, 20, 26, 32, 38, 44, 50, 56, 62, 68, 74, 80, 86, 92, 98, 104, 110, 116, 122, 128, 134, 140, 146, 152, 158, 164, 170, 176, 182, 188, 194, 200, 206, 212, 218, 224, 230, 236, 242, 248, 254, 260, 266, 272, 278, 284, 290, 296, 302, 308, 314, 320, 326, 332, 338, 344, 350, 356, 362 or 368.

[0371] In some embodiments of the invention, the modified AAV capsid includes a modified AAV capsid protein VP2 having an amino acid sequence selected from the group: SEQ ID No: 16, 22, 28, 34, 40, 46, 52, 58, 64, 70, 76, 82, 88, 94, 100, 106, 112, 118, 124, 130, 136, 142, 148, 154, 160, 166, 172, 178, 184, 190, 196, 202, 208, 214, 220, 226, 232, 238, 244, 250, 256, 262, 268, 274, 280, 286, 292, 298, 304, 310, 316, 322, 328, 334, 340, 346, 352, 358, 364 or 370.

[0372] In some embodiments of the invention, the modified AAV capsid includes a modified AAV capsid protein VP3 having an amino acid sequence selected from the group: SEQ ID No: 18, 24, 30, 36, 42, 48, 54, 60, 66, 72, 78, 84, 90, 96, 102, 108, 114, 120, 126, 132, 138, 144, 150, 156, 162, 168, 174, 180, 186, 192, 198, 204, 210, 216, 222, 228, 234, 240, 246, 252, 258, 264, 270, 276, 282, 288, 294, 300, 306, 312, 318, 324, 330, 336, 342, 348, 354, 360, 366 or 372.

[0373] In some embodiments of the invention, the modified AAV capsid comprises:
[0374] a) a modified AAV capsid protein VP1 having an amino acid sequence that is selected from the group: SEQ ID No: 14, 20, 26, 32, 38, 44, 50, 56, 62, 68, 74, 80, 86, 92, 98, 104, 110, 116, 122, 128, 134, 140, 146, 152, 158, 164, 170, 176, 182, 188, 194, 200, 206, 212, 218, 224, 230, 236, 242, 248, 254, 260, 266, 272, 278, 284, 290, 296, 302, 308, 314, 320, 326, 332, 338, 344, 350, 356, 362, or 368;
[0375] b) a modified AAV capsid protein VP2 corresponding to protein VP1 thereof, said modified AAV capsid protein VP2 having an amino acid sequence that is selected from the group: SEQ ID No: 16, 22, 28, 34, 40, 46, 52, 58, 64, 70, 76, 82, 88, 94, 100, 106, 112, 118, 124, 130, 136, 142, 148, 154, 160, 166, 172, 178, 184, 190, 196, 202, 208, 214, 220, 226, 232, 238, 244, 250, 256, 262, 268, 274, 280, 286, 292, 298, 304, 310, 316, 322, 328, 334, 340, 346, 352, 358, 364, or 370;
[0376] c) a modified AAV capsid protein VP3 corresponding to protein VP1 thereof, said modified AAV capsid protein VP3 having an amino acid sequence that is selected from the group: SEQ ID No: 18, 24, 30, 36, 42, 48, 54, 60, 66, 72, 78, 84, 90, 96, 102, 108, 114, 120, 126, 132, 138, 144, 150, 156, 162, 168, 174, 180, 186, 192, 198, 204, 210, 216, 222, 228, 234, 240, 246, 252, 258, 264, 270, 276, 282, 288, 294, 300, 306, 312, 318, 324, 330, 336, 342, 348, 354, 360, 366, or 372.

[0377] In some embodiments of the invention, the modified AAV capsid includes a modified AAV5 capsid protein VP1 comprising the substitution G226A (AAV5 Capsid VP1 G226A) and having the amino acid sequence of SEQ ID No: 14.

[0378] In some embodiments of the invention, the modified AAV capsid includes a modified AAV5 capsid protein VP2 comprising the substitution G90A (AAV5 Capsid VP2 G90A) and having the amino acid sequence of SEQ ID No: 16.

[0379] In some embodiments of the invention, the modified AAV capsid includes a modified AAV5 capsid protein VP3 comprising the substitution G34A (AAV5 Capsid VP3 G34A) and having the amino acid sequence of SEQ ID No: 18

[0380] In some embodiments of the invention, the modified AAV capsid includes a modified AAV5 capsid protein VP1 comprising the substitutions S2A, G226A and T711S (AAV5 Capsid VP1 S2A, G226A and T711S) and having the amino acid sequence of SEQ ID No: 20.

[0381] In some embodiments of the invention, the modified AAV capsid includes a modified AAV5 capsid protein VP2 comprising the substitutions G90A and T575S (AAV5 Capsid VP2 G90A and T575S) and having the amino acid sequence of SEQ ID No: 22.

[0382] In some embodiments of the invention, the modified AAV capsid includes a modified AAV5 capsid protein VP3 comprising the substitutions G34A T519S (AAV5 Capsid VP3 G34A T519S) and having the amino acid sequence of SEQ ID No: 24.

[0383] In some embodiments of the invention, the modified AAV capsid includes a modified AAV5 capsid protein VP1 comprising the substitution D286E (AAV5 Capsid VP1 D286E) and having the amino acid sequence of SEQ ID No: 26.

[0384] In some embodiments of the invention, the modified AAV capsid includes a modified AAV5 capsid protein VP2 comprising the substitution D150E (AAV5 Capsid VP2 D150E) and having the amino acid sequence of SEQ ID No: 28.

[0385] In some embodiments of the invention, the modified AAV capsid includes a modified AAV5 capsid protein VP3 comprising the substitution D94E (AAV5 Capsid VP3 D94E) and having the amino acid sequence of SEQ ID No: 30.

[0386] In some embodiments of the invention, the modified AAV capsid includes a modified AAV5 capsid protein VP1 comprising the substitutions S2A, D286E and T711S (AAV5 Capsid VP1 S2A, D286E and T711S) and having the amino acid sequence of SEQ ID No: 32.

[0387] In some embodiments of the invention, the modified AAV capsid includes a modified AAV5 capsid protein VP2 comprising the substitutions D150E and T575S (AAV5 Capsid VP2 D150E and T575S) and having the amino acid sequence of SEQ ID No: 34

[0388] In some embodiments of the invention, the modified AAV capsid includes a modified AAV5 capsid protein VP3 comprising the substitutions D94E and T519S (AAV5 Capsid VP3 D94E and T519S) and having the amino acid sequence of SEQ ID No: 36.

[0389] In some embodiments of the invention, the modified AAV capsid includes a modified AAV5 capsid protein VP1 comprising the substitution L341Y (AAV5 Capsid VP1 L341Y) and having the amino acid sequence of SEQ ID No: 38.

[0390] In some embodiments of the invention, the modified AAV capsid includes a modified AAV5 capsid protein VP2 comprising the substitution L205Y (AAV5 Capsid VP2 L205Y) and having the amino acid sequence of SEQ ID No: 40.

[0391] In some embodiments of the invention, the modified AAV capsid includes a modified AAV5 capsid protein VP3 comprising the substitution L149Y (AAV5 Capsid VP3 L149Y) and having the amino acid sequence of SEQ ID No: 42.

[0392] In some embodiments of the invention, the modified AAV capsid includes a modified AAV5 capsid protein VP1 comprising the substitutions S2A, L341Y, T711S (AAV5 Capsid VP1 S2A, L341Y, T711S) and having the amino acid sequence of SEQ ID No: 44.

[0393] In some embodiments of the invention, the modified AAV capsid includes a modified AAV5 capsid protein VP2 comprising the substitutions L205Y, T575S (AAV5 Capsid VP2 L205Y, T575S) and having the amino acid sequence of SEQ ID No: 46.

[0394] In some embodiments of the invention, the modified AAV capsid includes a modified AAV5 capsid protein VP3 comprising the substitutions L149Y, T519S (AAV5 Capsid VP3 L149Y, T519S) and having the amino acid sequence of SEQ ID No: 48.

[0395] In some embodiments of the invention, the modified AAV capsid includes a modified AAV5 capsid protein VP1 comprising the substitution C387V (AAV5 Capsid VP1 C387V) and having the amino acid sequence of SEQ ID No: 50.

[0396] In some embodiments of the invention, the modified AAV capsid includes a modified AAV5 capsid protein VP2 comprising the substitution C251V (AAV5 Capsid VP2 C251V) and having the amino acid sequence of SEQ ID No: 52.

[0397] In some embodiments of the invention, the modified AAV capsid includes a modified AAV5 capsid protein VP3 comprising the substitution C195V (AAV5 Capsid VP3 C195V) and having the amino acid sequence of SEQ ID No: 54.

[0398] In some embodiments of the invention, the modified AAV capsid includes a modified AAV5 capsid protein VP1 comprising the substitutions S2A, C387V, T711S (AAV5 Capsid VP1 S2A, C387V, T711S) and having the amino acid sequence of SEQ ID No: 56.

[0399] In some embodiments of the invention, the modified AAV capsid includes a modified AAV5 capsid protein VP2 comprising the substitutions C251V, T575S (AAV5 Capsid VP2 C251V, T575S) and having the amino acid sequence of SEQ ID No: 58.

[0400] In some embodiments of the invention, the modified AAV capsid includes a modified AAV5 capsid protein VP3 comprising the substitutions C195V, T519S (AAV5 Capsid VP3 C195V, T519S) and having the amino acid sequence of SEQ ID No: 60.

[0401] In some embodiments of the invention, the modified AAV capsid includes a modified AAV5 capsid protein VP1 comprising the substitution Q421H (AAV5 Capsid VP1 Q421H) and having the amino acid sequence of SEQ ID No: 62.

[0402] In some embodiments of the invention, the modified AAV capsid includes a modified AAV5 capsid protein VP2 comprising the substitution Q285H (AAV5 Capsid VP2 Q285H) and having the amino acid sequence of SEQ ID No: 64.

[0403] In some embodiments of the invention, the modified AAV capsid includes a modified AAV5 capsid protein VP3 comprising the substitution Q229H (AAV5 Capsid VP3 Q229H) and having the amino acid sequence of SEQ ID No: 66.

[0404] In some embodiments of the invention, the modified AAV capsid includes a modified AAV5 capsid protein VP1 comprising the substitutions S2A Q421H T711S (AAV5 Capsid VP1 S2A Q421H T711S) and having the amino acid sequence of SEQ ID No: 68.

[0405] In some embodiments of the invention, the modified AAV capsid includes a modified AAV5 capsid protein VP2 comprising the substitutions Q285H T575S (AAV5 Capsid VP2 Q285H T575S) and having the amino acid sequence of SEQ ID No: 70.

[0406] In some embodiments of the invention, the modified AAV capsid includes a modified AAV5 capsid protein VP3 comprising the substitutions Q229H T519S (AAV5 Capsid VP3 Q229H T519S) and having the amino acid sequence of SEQ ID No: 72.

[0407] In some embodiments of the invention, the modified AAV capsid includes a modified AAV5 capsid protein VP1 comprising the substitution P466T (AAV5 Capsid VP1 P466T) and having the amino acid sequence of SEQ ID No: 74.

[0408] In some embodiments of the invention, the modified AAV capsid includes a modified AAV5 capsid protein VP2 comprising the substitution P330T (AAV5 Capsid VP2 P330T) and having the amino acid sequence of SEQ ID No: 76.

[0409] In some embodiments of the invention, the modified AAV capsid includes a modified AAV5 capsid protein VP3 comprising the substitution P274T (AAV5 Capsid VP3 P274T) and having the amino acid sequence of SEQ ID No: 78.

[0410] In some embodiments of the invention, the modified AAV capsid includes a modified AAV5 capsid protein VP1 comprising the substitutions S2A P466T T711S (AAV5 Capsid VP1 S2A P466T T711S) and having the amino acid sequence of SEQ ID No: 80.

[0411] In some embodiments of the invention, the modified AAV capsid includes a modified AAV5 capsid protein VP2 comprising the substitutions P330T T575S (AAV5 Capsid VP2 P330T T575S) and having the amino acid sequence of SEQ ID No: 82.

[0412] In some embodiments of the invention, the modified AAV capsid includes a modified AAV5 capsid protein VP3 comprising the substitutions P274T T519S (AAV5 Capsid VP3 P274T T519S) and having the amino acid sequence of SEQ ID No: 84.

[0413] In some embodiments of the invention, the modified AAV capsid includes a modified AAV5 capsid protein VP1 comprising the substitution S594Q (AAV5 Capsid VP1 S594Q) and having the amino acid sequence of SEQ ID No: 86.

[0414] In some embodiments of the invention, the modified AAV capsid includes a modified AAV5 capsid protein VP2 comprising the substitution S458Q (AAV5 Capsid VP2 S458Q) and having the amino acid sequence of SEQ ID No: 88.

[0415] In some embodiments of the invention, the modified AAV capsid includes a modified AAV5 capsid protein VP3 comprising the substitution S402Q (AAV5 Capsid VP3 S402Q) and having the amino acid sequence of SEQ ID No: 90.

[0416] In some embodiments of the invention, the modified AAV capsid includes a modified AAV5 capsid protein VP1 comprising the substitutions S2A S594Q T711S (AAV5 Capsid VP1 S2A S594Q T711S) and having the amino acid sequence of SEQ ID No: 92.

[0417] In some embodiments of the invention, the modified AAV capsid includes a modified AAV5 capsid protein VP2 comprising the substitutions S458Q T575S (AAV5 Capsid VP2 S458Q T575S) and having the amino acid sequence of SEQ ID No: 94.

[0418] In some embodiments of the invention, the modified AAV capsid includes a modified AAV5 capsid protein VP3 comprising the substitutions S402Q T519S (AAV5 Capsid VP3 S402Q T519S) and having the amino acid sequence of SEQ ID No: 96.

[0419] In some embodiments of the invention, the modified AAV capsid includes a modified AAV5 capsid protein VP1 comprising the substitutions T614L (AAV5 Capsid VP1 T614L) and having the amino acid sequence of SEQ ID No: 98.

[0420] In some embodiments of the invention, the modified AAV capsid includes a modified AAV5 capsid protein VP2 comprising the substitutions T478L (AAV5 Capsid VP2 T478L) and having the amino acid sequence of SEQ ID No: 100.

[0421] In some embodiments of the invention, the modified AAV capsid includes a modified AAV5 capsid protein VP3 comprising the substitutions T422L (AAV5 Capsid VP3 T422L) and having the amino acid sequence of SEQ ID No: 102.

[0422] In some embodiments of the invention, the modified AAV capsid includes a modified AAV5 capsid protein VP1 comprising the substitutions S2A T614L T711S (AAV5 Capsid VP1 S2A T614L T711S) and having the amino acid sequence of SEQ ID No: 104.

[0423] In some embodiments of the invention, the modified AAV capsid includes a modified AAV5 capsid protein VP2 comprising the substitutions T478L T575S (AAV5 Capsid VP2 T478L T575S) and having the amino acid sequence of SEQ ID No: 106.

[0424] In some embodiments of the invention, the modified AAV capsid includes a modified AAV5 capsid protein VP3 comprising the substitutions (AAV5 Capsid VP3 T422L T519S) and having the amino acid sequence of SEQ ID No: 108.

[0425] In some embodiments of the invention, the modified AAV capsid includes a modified AAV5 capsid protein VP1 comprising the substitution N679K (AAV5 Capsid VP1 N679K) and having the amino acid sequence of SEQ ID No: 110.

[0426] In some embodiments of the invention, the modified AAV capsid includes a modified AAV5 capsid protein VP2 comprising the substitution N543K (AAV5 Capsid VP2 N543K) and having the amino acid sequence of SEQ ID No: 112.

[0427] In some embodiments of the invention, the modified AAV capsid includes a modified AAV5 capsid protein VP3 comprising the substitution N487K (AAV5 Capsid VP3 N487K) and having the amino acid sequence of SEQ ID No: 114.

[0428] In some embodiments of the invention, the modified AAV capsid includes a modified AAV5 capsid protein VP1 comprising the substitutions S2A N679K T711S (AAV5 Capsid VP1 S2A N679K T711S) and having the amino acid sequence of SEQ ID No: 116.

[0429] In some embodiments of the invention, the modified AAV capsid includes a modified AAV5 capsid protein VP2 comprising the substitutions N543K T575S (AAV5 Capsid VP2 N543K T575S) and having the amino acid sequence of SEQ ID No: 118.

[0430] In some embodiments of the invention, the modified AAV capsid includes a modified AAV5 capsid protein VP3 comprising the substitutions N487K T519S (AAV5 Capsid VP3 N487K T519S) and having the amino acid sequence of SEQ ID No: 120.

[0431] In some embodiments of the invention, the modified AAV capsid includes a modified AAV5 capsid protein VP1 comprising the substitution P723V (AAV5 Capsid VP1 P723V) and having the amino acid sequence of SEQ ID No: 122.

[0432] In some embodiments of the invention, the modified AAV capsid includes a modified AAV5 capsid protein VP2 comprising the substitution P587V (AAV5 Capsid VP2 P587V) and having the amino acid sequence of SEQ ID No: 124.

[0433] In some embodiments of the invention, the modified AAV capsid includes a modified AAV5 capsid protein VP3 comprising the substitution P531V (AAV5 Capsid VP3 P531V) and having the amino acid sequence of SEQ ID No: 126.

[0434] In some embodiments of the invention, the modified AAV capsid includes a modified AAV5 capsid protein VP1 comprising the substitutions P723V T711S (AAV5 Capsid VP1 S2A P723V T711S) and having the amino acid sequence of SEQ ID No: 128.

[0435] In some embodiments of the invention, the modified AAV capsid includes a modified AAV5 capsid protein VP2 comprising the substitutions P587V T575S (AAV5 Capsid VP2 P587V T575S) and having the amino acid sequence of SEQ ID No: 130.

[0436] In some embodiments of the invention, the modified AAV capsid includes a modified AAV5 capsid protein VP3 comprising the substitutions P531V T519S (AAV5 Capsid VP3 P531V T519S) and having the amino acid sequence of SEQ ID No: 132.

[0437] In some embodiments of the invention, the modified AAV capsid includes a modified AAV5 capsid protein VP1 comprising the substitution V431Y (AAV5 Capsid VP1 V431Y) and having the amino acid sequence of SEQ ID No: 134.

[0438] In some embodiments of the invention, the modified AAV capsid includes a modified AAV5 capsid protein VP2 comprising the substitution V295Y (AAV5 Capsid VP2 V295Y) and having the amino acid sequence of SEQ ID No: 136.

[0439] In some embodiments of the invention, the modified AAV capsid includes a modified AAV5 capsid protein VP3 comprising the substitution V239Y (AAV5 Capsid VP3 V239Y) and having the amino acid sequence of SEQ ID No: 138.

[0440] In some embodiments of the invention, the modified AAV capsid includes a modified AAV5 capsid protein VP1 comprising the substitutions S2A V431Y T711S (AAV5 Capsid VP1 S2A V431Y T711S) and having the amino acid sequence of SEQ ID No: 140.

[0441] In some embodiments of the invention, the modified AAV capsid includes a modified AAV5 capsid protein VP2 comprising the substitutions V295Y T575S (AAV5 Capsid VP2 V295Y T575S) and having the amino acid sequence of SEQ ID No: 142.

[0442] In some embodiments of the invention, the modified AAV capsid includes a modified AAV5 capsid protein VP3 comprising the substitutions V239Y T519S (AAV5 Capsid VP3 V239Y T519S) and having the amino acid sequence of SEQ ID No: 144.

[0443] In some embodiments of the invention, the modified AAV capsid includes a modified AAV5 capsid protein VP1 comprising the substitution A616D (AAV5 Capsid VP1 A616D) and having the amino acid sequence of SEQ ID No: 146.

[0444] In some embodiments of the invention, the modified AAV capsid includes a modified AAV5 capsid protein VP2 comprising the substitution A480D (AAV5 Capsid VP2 A480D) and having the amino acid sequence of SEQ ID No: 148.

[0445] In some embodiments of the invention, the modified AAV capsid includes a modified AAV5 capsid protein VP3 comprising the substitution A424D (AAV5 Capsid VP3 A424D) and having the amino acid sequence of SEQ ID No: 150.

[0446] In some embodiments of the invention, the modified AAV capsid includes a modified AAV5 capsid protein VP1 comprising the substitutions S2A A616D T711S (AAV5 Capsid VP1 S2A A616D T711S) and having the amino acid sequence of SEQ ID No: 152.

[0447] In some embodiments of the invention, the modified AAV capsid includes a modified AAV5 capsid protein VP2 comprising the substitutions A480D T575S (AAV5 Capsid VP2 A480D T575S) and having the amino acid sequence of SEQ ID No: 154.

[0448] In some embodiments of the invention, the modified AAV capsid includes a modified AAV5 capsid protein VP3 comprising the substitutions A424D T519S (AAV5 Capsid VP3 A424D T519S) and having the amino acid sequence of SEQ ID No: 156.

[0449] In some embodiments of the invention, the modified AAV capsid includes a modified AAV5 capsid protein VP1 comprising the substitution W683R (AAV5 Capsid VP1 W683R) and having the amino acid sequence of SEQ ID No: 158.

[0450] In some embodiments of the invention, the modified AAV capsid includes a modified AAV5 capsid protein VP2 comprising the substitution W547R (AAV5 Capsid VP2 W547R) and having the amino acid sequence of SEQ ID No: 160.

[0451] In some embodiments of the invention, the modified AAV capsid includes a modified AAV5 capsid protein VP3 comprising the substitution W491R (AAV5 Capsid VP3 W491R) and having the amino acid sequence of SEQ ID No: 162.

[0452] In some embodiments of the invention, the modified AAV capsid includes a modified AAV5 capsid protein VP1 comprising the substitutions S2A W683R T711S (AAV5 Capsid VP1 S2A W683R T711S) and having the amino acid sequence of SEQ ID No: 164.

[0453] In some embodiments of the invention, the modified AAV capsid includes a modified AAV5 capsid protein VP2 comprising the substitutions W547R T575S (AAV5 Capsid VP2 W547R T575S) and having the amino acid sequence of SEQ ID No: 166.

[0454] In some embodiments of the invention, the modified AAV capsid includes a modified AAV5 capsid protein VP3 comprising the substitutions W491R T519S (AAV5 Capsid VP3 W491R T519S) and having the amino acid sequence of SEQ ID No: 168.

[0455] In some embodiments of the invention, the modified AAV capsid includes a modified AAV5 capsid protein VP1 comprising the substitution S222A (AAV5 Capsid VP1 S222A) and having the amino acid sequence of SEQ ID No: 170.

[0456] In some embodiments of the invention, the modified AAV capsid includes a modified AAV5 capsid protein VP2 comprising the substitution S86A (AAV5 Capsid VP2 S86A) and having the amino acid sequence of SEQ ID No: 172.

[0457] In some embodiments of the invention, the modified AAV capsid includes a modified AAV5 capsid protein VP3 comprising the substitution S30A (AAV5 Capsid VP3 S30A) and having the amino acid sequence of SEQ ID No: 174.

[0458] In some embodiments of the invention, the modified AAV capsid includes a modified AAV5 capsid protein VP1 comprising the substitutions S2A S222A T711S (AAV5 Capsid VP1 S2A S222A T711S) and having the amino acid sequence of SEQ ID No: 176.

[0459] In some embodiments of the invention, the modified AAV capsid includes a modified AAV5 capsid protein VP2 comprising the substitutions S86A T575S (AAV5 Capsid VP2 S86A T575S) and having the amino acid sequence of SEQ ID No: 178.

[0460] In some embodiments of the invention, the modified AAV capsid includes a modified AAV5 capsid protein VP3 comprising the substitutions S30A T519S (AAV5 Capsid VP3 S30A T519S) and having the amino acid sequence of SEQ ID No: 180.

[0461] In some embodiments of the invention, the modified AAV capsid includes a modified AAV5 capsid protein VP1 comprising the substitution R285L (AAV5 Capsid VP1 R285L) and having the amino acid sequence of SEQ ID No: 182.

[0462] In some embodiments of the invention, the modified AAV capsid includes a modified AAV5 capsid protein VP2 comprising the substitution R149L (AAV5 Capsid VP2 R149L) and having the amino acid sequence of SEQ ID No: 184.

[0463] In some embodiments of the invention, the modified AAV capsid includes a modified AAV5 capsid protein VP3 comprising the substitution R93L (AAV5 Capsid VP3 R93L) and having the amino acid sequence of SEQ ID No: 186.

[0464] In some embodiments of the invention, the modified AAV capsid includes a modified AAV5 capsid protein VP1 comprising the substitutions S2A R285L T711S (AAV5 Capsid VP1 S2A R285L T711S) and having the amino acid sequence of SEQ ID No: 188.

[0465] In some embodiments of the invention, the modified AAV capsid includes a modified AAV5 capsid protein VP2 comprising the substitutions R149L T575S (AAV5 Capsid VP2 R149L T575S) and having the amino acid sequence of SEQ ID No: 190.

[0466] In some embodiments of the invention, the modified AAV capsid includes a modified AAV5 capsid protein VP3 comprising the substitutions R93L T519S (AAV5 Capsid VP3 R93L T519S) and having the amino acid sequence of SEQ ID No: 192.

[0467] In some embodiments of the invention, the modified AAV capsid includes a modified AAV5 capsid protein VP1 comprising the substitution Q340A (AAV5 Capsid VP1 Q340A) and having the amino acid sequence of SEQ ID No: 194.

[0468] In some embodiments of the invention, the modified AAV capsid includes a modified AAV5 capsid protein VP2 comprising the substitution (AAV5 Capsid VP2 Q204A) and having the amino acid sequence of SEQ ID No: 196.

[0469] In some embodiments of the invention, the modified AAV capsid includes a modified AAV5 capsid protein VP3 comprising the substitution Q148A (AAV5 Capsid VP3 Q148A) and having the amino acid sequence of SEQ ID No: 198.

[0470] In some embodiments of the invention, the modified AAV capsid includes a modified AAV5 capsid protein VP1 comprising the substitutions S2A Q340A T711S (AAV5 Capsid VP1 S2A Q340A T711S) and having the amino acid sequence of SEQ ID No: 200.

[0471] In some embodiments of the invention, the modified AAV capsid includes a modified AAV5 capsid protein VP2 comprising the substitutions Q204A T575S (AAV5 Capsid VP2 Q204A T575S) and having the amino acid sequence of SEQ ID No: 202.

[0472] In some embodiments of the invention, the modified AAV capsid includes a modified AAV5 capsid protein VP3 comprising the substitutions Q148A T519S (AAV5 Capsid VP3 Q148A T519S) and having the amino acid sequence of SEQ ID No: 204.

[0473] In some embodiments of the invention, the modified AAV capsid includes a modified AAV5 capsid protein VP1 comprising the substitution S420F (AAV5 Capsid VP1 S420F) and having the amino acid sequence of SEQ ID No: 206.

[0474] In some embodiments of the invention, the modified AAV capsid includes a modified AAV5 capsid protein VP2 comprising the substitution S284F (AAV5 Capsid VP2 S284F) and having the amino acid sequence of SEQ ID No: 208.

[0475] In some embodiments of the invention, the modified AAV capsid includes a modified AAV5 capsid protein VP3 comprising the substitution S228F (AAV5 Capsid VP3 S228F) and having the amino acid sequence of SEQ ID No: 210.

[0476] In some embodiments of the invention, the modified AAV capsid includes a modified AAV5 capsid protein VP1 comprising the substitutions S2A S420F T711S (AAV5 Capsid VP1 S2A S420F T711S) and having the amino acid sequence of SEQ ID No: 212.

[0477] In some embodiments of the invention, the modified AAV capsid includes a modified AAV5 capsid protein VP2 comprising the substitutions S284F T575S (AAV5 Capsid VP2 S284F T575S) and having the amino acid sequence of SEQ ID No: 214.

[0478] In some embodiments of the invention, the modified AAV capsid includes a modified AAV5 capsid protein VP3 comprising the substitutions S228F T519S (AAV5 Capsid VP3 S228F T519S) and having the amino acid sequence of SEQ ID No: 216.

[0479] In some embodiments of the invention, the modified AAV capsid includes a modified AAV5 capsid protein VP1 comprising the substitution S680A (AAV5 Capsid VP1 S680A) and having the amino acid sequence of SEQ ID No: 218.

[0480] In some embodiments of the invention, the modified AAV capsid includes a modified AAV5 capsid protein VP2 comprising the substitution S544A (AAV5 Capsid VP2 S544A) and having the amino acid sequence of SEQ ID No: 220.

[0481] In some embodiments of the invention, the modified AAV capsid includes a modified AAV5 capsid protein VP3 comprising the substitution S488A (AAV5 Capsid VP3 S488A) and having the amino acid sequence of SEQ ID No: 222.

[0482] In some embodiments of the invention, the modified AAV capsid includes a modified AAV5 capsid protein VP1 comprising the substitutions S2A S680A T711S (AAV5 Capsid VP1 S2A S680A T711S) and having the amino acid sequence of SEQ ID No: 224.

[0483] In some embodiments of the invention, the modified AAV capsid includes a modified AAV5 capsid protein VP2 comprising the substitutions S544A T575S (AAV5 Capsid VP2 S544A T575S) and having the amino acid sequence of SEQ ID No: 226.

[0484] In some embodiments of the invention, the modified AAV capsid includes a modified AAV5 capsid protein VP3 comprising the substitutions S488A T519S (AAV5 Capsid VP3 S488A T519S) and having the amino acid sequence of SEQ ID No: 228.

[0485] In some embodiments of the invention, the modified AAV capsid includes a modified AAV5 capsid protein VP1 comprising the substitution T721V (AAV5 Capsid VP1 T721V) and having the amino acid sequence of SEQ ID No: 230.

[0486] In some embodiments of the invention, the modified AAV capsid includes a modified AAV5 capsid protein VP2 comprising the substitution T585V (AAV5 Capsid VP2 T585V) and having the amino acid sequence of SEQ ID No: 232.

[0487] In some embodiments of the invention, the modified AAV capsid includes a modified AAV5 capsid protein VP3 comprising the substitution T529V (AAV5 Capsid VP3 T529V) and having the amino acid sequence of SEQ ID No: 234.

[0488] In some embodiments of the invention, the modified AAV capsid includes a modified AAV5 capsid protein VP1 comprising the substitutions S2A T721V T711S (AAV5 Capsid VP1 S2A T721V T711S) and having the amino acid sequence of SEQ ID No: 236.

[0489] In some embodiments of the invention, the modified AAV capsid includes a modified AAV5 capsid protein VP2 comprising the substitutions T585V T575S (AAV5 Capsid VP2 T585V T575S) and having the amino acid sequence of SEQ ID No: 238.

[0490] In some embodiments of the invention, the modified AAV capsid includes a modified AAV5 capsid protein VP3 comprising the substitutions T529V T519S (AAV5 Capsid VP3 T529V T519S) and having the amino acid sequence of SEQ ID No: 240.

[0491] In some embodiments of the invention, the modified AAV capsid includes a modified AAV9 capsid protein VP1 comprising the substitution Q351K (AAV9 Capsid VP1 Q351K) and having the amino acid sequence of SEQ ID No: 242.

[0492] In some embodiments of the invention, the modified AAV capsid includes a modified AAV9 capsid protein VP2 comprising the substitution Q214K (AAV9 Capsid VP2 Q214K) and having the amino acid sequence of SEQ ID No: 244.

[0493] In some embodiments of the invention, the modified AAV capsid includes a modified AAV9 capsid protein VP3 comprising the substitution Q149K (AAV9 Capsid VP3 Q149K) and having the amino acid sequence of SEQ ID No: 246.

[0494] In some embodiments of the invention, the modified AAV capsid includes a modified AAV9 capsid protein VP1 comprising the substitution Q351R (AAV9 Capsid VP1 Q351R) and having the amino acid sequence of SEQ ID No: 248.

[0495] In some embodiments of the invention, the modified AAV capsid includes a modified AAV9 capsid protein VP2 comprising the substitution Q214R (AAV9 Capsid VP2 Q214R) and having the amino acid sequence of SEQ ID No: 250.

[0496] In some embodiments of the invention, the modified AAV capsid includes a modified AAV9 capsid protein VP3 comprising the substitution Q149R (AAV9 Capsid VP3 Q149R) and having the amino acid sequence of SEQ ID No: 252.

[0497] In some embodiments of the invention, the modified AAV capsid includes a modified AAV9 capsid protein VP1 comprising the substitution S232T (AAV9 Capsid VP1 S232T) and having the amino acid sequence of SEQ ID No: 254.

[0498] In some embodiments of the invention, the modified AAV capsid includes a modified AAV9 capsid protein VP2 comprising the substitution S95T (AAV9 Capsid VP2 S95T) and having the amino acid sequence of SEQ ID No: 256.

[0499] In some embodiments of the invention, the modified AAV capsid includes a modified AAV9 capsid protein VP3 comprising the substitution S30T (AAV9 Capsid VP3 S30T) and having the amino acid sequence of SEQ ID No: 258.

[0500] In some embodiments of the invention, the modified AAV capsid includes a modified AAV9 capsid protein VP1 comprising the substitution D297E (AAV9 Capsid VP1 D297E) and having the amino acid sequence of SEQ ID No: 260.

[0501] In some embodiments of the invention, the modified AAV capsid includes a modified AAV9 capsid protein VP2 comprising the substitution D160E (AAV9 Capsid VP2 D160E) and having the amino acid sequence of SEQ ID No: 262.

[0502] In some embodiments of the invention, the modified AAV capsid includes a modified AAV9 capsid protein VP3 comprising the substitution D95E (AAV9 Capsid VP3 D95E) and having the amino acid sequence of SEQ ID No: 264.

[0503] In some embodiments of the invention, the modified AAV capsid includes a modified AAV9 capsid protein VP1 comprising the substitution S692T (AAV9 Capsid VP1 S692T) and having the amino acid sequence of SEQ ID No: 266.

[0504] In some embodiments of the invention, the modified AAV capsid includes a modified AAV9 capsid protein VP2 comprising the substitution S555T (AAV9 Capsid VP2 S555T) and having the amino acid sequence of SEQ ID No: 268.

[0505] In some embodiments of the invention, the modified AAV capsid includes a modified AAV9 capsid protein VP3 comprising the substitution S490T (AAV9 Capsid VP3 S490T) and having the amino acid sequence of SEQ ID No: 270.

[0506] In some embodiments of the invention, the modified AAV capsid includes a modified AAV9 capsid protein VP1 comprising the substitution D433Y (AAV9 Capsid VP1 D433Y) and having the amino acid sequence of SEQ ID No: 272.

[0507] In some embodiments of the invention, the modified AAV capsid includes a modified AAV9 capsid protein VP2 comprising the substitution D296Y (AAV9 Capsid VP2 D296Y) and having the amino acid sequence of SEQ ID No: 274.

[0508] In some embodiments of the invention, the modified AAV capsid includes a modified AAV9 capsid protein VP3 comprising the substitution D231Y (AAV9 Capsid VP3 D231Y) and having the amino acid sequence of SEQ ID No: 276.

[0509] In some embodiments of the invention, the modified AAV capsid includes a modified AAV9 capsid protein VP1 comprising the substitution T625L (AAV9 Capsid VP1 T625L) and having the amino acid sequence of SEQ ID No: 278.

[0510] In some embodiments of the invention, the modified AAV capsid includes a modified AAV9 capsid protein VP2 comprising the substitution T488L (AAV9 Capsid VP2 T488L) and having the amino acid sequence of SEQ ID No: 280.

[0511] In some embodiments of the invention, the modified AAV capsid includes a modified AAV9 capsid protein VP3 comprising the substitution T423L (AAV9 Capsid VP3 T423L) and having the amino acid sequence of SEQ ID No: 282.

[0512] In some embodiments of the invention, the modified AAV capsid includes a modified AAV9 capsid protein VP1 comprising the substitution T625V (AAV9 Capsid VP1 T625V) and having the amino acid sequence of SEQ ID No: 284.

[0513] In some embodiments of the invention, the modified AAV capsid includes a modified AAV9 capsid protein VP2 comprising the substitution T488V (AAV9 Capsid VP2 T488V) and having the amino acid sequence of SEQ ID No: 286.

[0514] In some embodiments of the invention, the modified AAV capsid includes a modified AAV9 capsid protein VP3 comprising the substitution T423V (AAV9 Capsid VP3 T423V) and having the amino acid sequence of SEQ ID No: 288.

[0515] In some embodiments of the invention, the modified AAV capsid includes a modified AAV9 capsid protein VP1 comprising the substitution N691A (AAV9 Capsid VP1 N691A) and having the amino acid sequence of SEQ ID No: 290.

[0516] In some embodiments of the invention, the modified AAV capsid includes a modified AAV9 capsid protein VP2 comprising the substitution N554A (AAV9 Capsid VP2 N554A) and having the amino acid sequence of SEQ ID No: 292.

[0517] In some embodiments of the invention, the modified AAV capsid includes a modified AAV9 capsid protein VP3 comprising the substitution N489A (AAV9 Capsid VP3 N489A) and having the amino acid sequence of SEQ ID No: 294.

[0518] In some embodiments of the invention, the modified AAV capsid includes a modified AAV9 capsid protein VP1 comprising the substitution C396V (AAV9 Capsid VP1 C396V) and having the amino acid sequence of SEQ ID No: 296.

[0519] In some embodiments of the invention, the modified AAV capsid includes a modified AAV9 capsid protein VP2 comprising the substitution C259V (AAV9 Capsid VP2 C259V) and having the amino acid sequence of SEQ ID No: 298.

[0520] In some embodiments of the invention, the modified AAV capsid includes a modified AAV9 capsid protein VP3 comprising the substitution C194V (AAV9 Capsid VP3 C194V) and having the amino acid sequence of SEQ ID No: 300.

[0521] In some embodiments of the invention, the modified AAV capsid includes a modified AAV9 capsid protein VP1 comprising the substitution Y478F (AAV9 Capsid VP1 Y478F) and having the amino acid sequence of SEQ ID No: 302.

[0522] In some embodiments of the invention, the modified AAV capsid includes a modified AAV9 capsid protein VP2 comprising the substitution Y341F (AAV9 Capsid VP2 Y341F) and having the amino acid sequence of SEQ ID No: 304.

[0523] In some embodiments of the invention, the modified AAV capsid includes a modified AAV9 capsid protein VP3 comprising the substitution Y276F (AAV9 Capsid VP3 Y276F) and having the amino acid sequence of SEQ ID No: 306.

[0524] In some embodiments of the invention, the modified AAV capsid includes a modified AAV9 capsid protein VP1 comprising the substitution R296L (AAV9 Capsid VP1 R296L) and having the amino acid sequence of SEQ ID No: 308.

[0525] In some embodiments of the invention, the modified AAV capsid includes a modified AAV9 capsid protein VP2 comprising the substitution R159L (AAV9 Capsid VP2 R159L) and having the amino acid sequence of SEQ ID No: 310.

[0526] In some embodiments of the invention, the modified AAV capsid includes a modified AAV9 capsid protein VP3 comprising the substitution R94L (AAV9 Capsid VP3 R94L) and having the amino acid sequence of SEQ ID No: 312.

[0527] In some embodiments of the invention, the modified AAV capsid includes a modified AAV9 capsid protein VP1 comprising the substitution T733V (AAV9 Capsid VP1 T733V) and having the amino acid sequence of SEQ ID No: 314.

[0528] In some embodiments of the invention, the modified AAV capsid includes a modified AAV9 capsid protein VP2 comprising the substitution T596V (AAV9 Capsid VP2 T596V) and having the amino acid sequence of SEQ ID No: 316.

[0529] In some embodiments of the invention, the modified AAV capsid includes a modified AAV9 capsid protein VP3 comprising the substitution T531V (AAV9 Capsid VP3 T531V) and having the amino acid sequence of SEQ ID No: 318.

[0530] In some embodiments of the invention, the modified AAV capsid includes a modified AAV9 capsid protein VP1 comprising the substitution A427R (AAV9 Capsid VP1 A427R) and having the amino acid sequence of SEQ ID No: 320.

[0531] In some embodiments of the invention, the modified AAV capsid includes a modified AAV9 capsid protein VP2 comprising the substitution A290R (AAV9 Capsid VP2 A290R) and having the amino acid sequence of SEQ ID No: 322.

[0532] In some embodiments of the invention, the modified AAV capsid includes a modified AAV9 capsid protein VP3 comprising the substitution A225R (AAV9 Capsid VP3 A225R) and having the amino acid sequence of SEQ ID No: 324.

[0533] In some embodiments of the invention, the modified AAV capsid includes a modified AAV9 capsid protein VP1 comprising the substitution M635D (AAV9 Capsid VP1 M635D) and having the amino acid sequence of SEQ ID No: 326.

[0534] In some embodiments of the invention, the modified AAV capsid includes a modified AAV9 capsid protein VP2 comprising the substitution M498D (AAV9 Capsid VP2 M498D) and having the amino acid sequence of SEQ ID No: 328.

[0535] In some embodiments of the invention, the modified AAV capsid includes a modified AAV9 capsid protein VP3 comprising the substitution M433D (AAV9 Capsid VP3 M433D) and having the amino acid sequence of SEQ ID No: 330.

[0536] In some embodiments of the invention, the modified AAV capsid includes a modified AAV9 capsid protein VP1 comprising the substitution L444R (AAV9 Capsid VP1 L444R) and having the amino acid sequence of SEQ ID No: 332.

[0537] In some embodiments of the invention, the modified AAV capsid includes a modified AAV9 capsid protein VP2 comprising the substitution L307R (AAV9 Capsid VP2 L307R) and having the amino acid sequence of SEQ ID No: 334.

[0538] In some embodiments of the invention, the modified AAV capsid includes a modified AAV9 capsid protein VP3 comprising the substitution L242R (AAV9 Capsid VP3 L242R) and having the amino acid sequence of SEQ ID No: 336.

[0539] In some embodiments of the invention, the modified AAV capsid includes a modified AAV9 capsid protein VP1 comprising the substitution G604N (AAV9 Capsid VP1 G604N) and having the amino acid sequence of SEQ ID No: 338.

[0540] In some embodiments of the invention, the modified AAV capsid includes a modified AAV9 capsid protein VP2 comprising the substitution G467N (AAV9 Capsid VP2 G467N) and having the amino acid sequence of SEQ ID No: 340.

[0541] In some embodiments of the invention, the modified AAV capsid includes a modified AAV9 capsid protein VP3 comprising the substitution G402N (AAV9 Capsid VP3 G402N) and having the amino acid sequence of SEQ ID No: 342.

[0542] In some embodiments of the invention, the modified AAV capsid includes a modified AAV9 capsid protein VP1 comprising the substitution G627K (AAV9 Capsid VP1 G627K) and having the amino acid sequence of SEQ ID No: 344.

[0543] In some embodiments of the invention, the modified AAV capsid includes a modified AAV9 capsid protein VP2 comprising the substitution G490K (AAV9 Capsid VP2 G490K) and having the amino acid sequence of SEQ ID No: 346.

[0544] In some embodiments of the invention, the modified AAV capsid includes a modified AAV9 capsid protein VP3 comprising the substitution G425K (AAV9 Capsid VP3 G425K) and having the amino acid sequence of SEQ ID No: 348.

[0545] In some embodiments of the invention, the modified AAV capsid includes a modified AAV9 capsid protein VP1 comprising the substitution W695R (AAV9 Capsid VP1 W695R) and having the amino acid sequence of SEQ ID No: 350.

[0546] In some embodiments of the invention, the modified AAV capsid includes a modified AAV9 capsid protein VP2 comprising the substitution W558R (AAV9 Capsid VP2 W558R) and having the amino acid sequence of SEQ ID No: 352.

[0547] In some embodiments of the invention, the modified AAV capsid includes a modified AAV9 capsid protein VP3 comprising the substitution W493R (AAV9 Capsid VP3 W493R) and having the amino acid sequence of SEQ ID No: 354.

[0548] In some embodiments of the invention, the modified AAV capsid includes a modified AAV9 capsid protein VP1 comprising the substitution Q351A (AAV9 Capsid VP1 Q351A) and having the amino acid sequence of SEQ ID No: 356.

[0549] In some embodiments of the invention, the modified AAV capsid includes a modified AAV9 capsid protein VP2 comprising the substitution Q214A (AAV9 Capsid VP2 Q214A) and having the amino acid sequence of SEQ ID No: 358.

[0550] In some embodiments of the invention, the modified AAV capsid includes a modified AAV9 capsid protein VP3 comprising the substitution Q149A (AAV9 Capsid VP3 Q149A) and having the amino acid sequence of SEQ ID No: 360.

[0551] In some embodiments of the invention, the modified AAV capsid includes a modified AAV9 capsid protein VP1 comprising the substitution Y395F (AAV9 Capsid VP1 Y395F) and having the amino acid sequence of SEQ ID No: 362.

[0552] In some embodiments of the invention, the modified AAV capsid includes a modified AAV9 capsid protein VP2 comprising the substitution Y258F (AAV9 Capsid VP2 Y258F) and having the amino acid sequence of SEQ ID No: 364.

[0553] In some embodiments of the invention, the modified AAV capsid includes a modified AAV9 capsid protein VP3 comprising the substitution Y193F (AAV9 Capsid VP3 Y193F) and having the amino acid sequence of SEQ ID No: 366.

[0554] In some embodiments of the invention, the modified AAV capsid includes a modified AAV9 capsid protein VP1 comprising the substitution R434L (AAV9 Capsid VP1 R434L) and having the amino acid sequence of SEQ ID No: 368.

[0555] In some embodiments of the invention, the modified AAV capsid includes a modified AAV9 capsid protein VP2 comprising the substitution R297L (AAV9 Capsid VP2 R297L) and having the amino acid sequence of SEQ ID No: 370.

[0556] In some embodiments of the invention, the modified AAV capsid includes a modified AAV9 capsid protein VP3 comprising the substitution (AAV9 Capsid VP3 R232L) and having the amino acid sequence of SEQ ID No: 372.

[0557] All of the above one or more substitutions in the modified AAV capsid are calculated relative to the corresponding wild-type capsid.

[0558] The naturally-occurring sequence of wild-type AAV5 capsid protein VP1 (AAV5 Capsid VP1 WT) is represented by the amino acid sequence of SEQ ID No: 2, the naturally-occurring sequence of wild-type AAV5 capsid protein VP2 (AAV5 Capsid VP2 WT) is represented by the amino acid sequence of SEQ ID No: 4, the naturally-occurring sequence of wild-type AAV5 capsid protein VP3 (AAV5 Capsid VP3 WT) is represented by the amino acid sequence of SEQ ID No: 6.

[0559] The naturally-occurring sequence of wild-type AAV9 capsid protein VP1 (AAV9 Capsid VP1 WT) is represented by the amino acid sequence of SEQ ID No: 373, the naturally-occurring sequence of wild-type AAV9 capsid protein VP2 (AAV9 Capsid VP2 WT) is represented by the amino acid sequence of SEQ ID No: 375, the naturally-occurring sequence of wild-type AAV9 capsid protein VP3 (AAV9 Capsid VP3 WT) is represented by the amino acid sequence of SEQ ID No: 377.

[0560] The authors of the invention have found that the above modified AAV capsids have one or more improved properties as compared to AAV capsid free of said modifications (wild-type AAV capsid), which are selected from the group:
[0561] increased efficiency of cell transduction,
[0562] increased production of target protein,
[0563] increased efficiency of generation due to highly efficient production (assembly) of encapsidated viral vectors based on recombinant adeno-associated virus (rAAV).

### Isolated Nucleic Acid Encoding Modified Capsid According to the Invention

[0564] In one aspect, the present invention relates to a nucleic acid that encodes any of the above modified capsids.

[0565] In any embodiment of the invention, the nucleic acid molecule may be isolated.

[0566] The terms “nucleic acid”, “nucleic sequence”, “nucleic acid sequence”, “polynucleotide”, “oligonucleotide”, “polynucleotide sequence” and “nucleotide sequence”, used interchangeably in the present description, mean a precise sequence of nucleotides, modified or not, determining a fragment or a region of a nucleic acid, containing unnatural nucleotides or not, and being either a double-strand DNA or RNA, a single-strand DNA or RNA, or transcription products of said DNAs.

[0567] As used in the present description, polynucleotides include, as non-limiting examples, all nucleic acid sequences which are obtained by any means available in the art, including, as non-limiting examples, recombinant means, i.e. the cloning of nucleic acid sequences from a recombinant library or a cell genome, using ordinary cloning technology and PCR and the like, and by synthetic means.

[0568] It should also be included here that the present invention does not relate to nucleotide sequences in their natural chromosomal environment, i.e. in a natural state. The sequences of the present invention have been isolated and/or purified, i.e. they were sampled directly or indirectly, for example by copying. Thus, isolated nucleic acids obtained by recombinant genetics, by means, for example, of host cells, or obtained by chemical synthesis should also be mentioned here.

[0569] A reference to a nucleotide sequence encompasses the complement thereof unless otherwise specified. Thus, a reference to a nucleic acid having a particular sequence should be understood as one which encompasses the complementary strand thereof with the complementary sequence thereof.

[0570] An “isolated” nucleic acid molecule is one which is identified and separated from at least one nucleic acid molecule-impurity, which the former is bound to in the natural source of antibody nucleic acid. An isolated nucleic acid molecule is different from the form or set in which it is found under natural conditions. Thus, an isolated nucleic acid molecule is different from a nucleic acid molecule that exists in cells under natural conditions.

[0571] In some embodiments of the invention, the isolated nucleic acid is DNA.

[0572] In some embodiments of the invention, the isolated nucleic acid encoding a modified capsid includes a nucleic acid encoding a modified AAV5 capsid protein VP1 comprising the substitution G226A (AAV5 Capsid VP1 G226A) that has the nucleotide sequence of SEQ ID No: 13 or any other nucleotide sequence encoding the corresponding amino acid sequence of the given modified protein.

[0573] In some embodiments of the invention, the isolated nucleic acid encoding a modified capsid includes a nucleic acid encoding a modified AAV5 capsid protein VP2 comprising the substitution G90A (AAV5 Capsid VP2 G90A) that has the nucleotide sequence of SEQ ID No: 15 or any other nucleotide sequence encoding the corresponding amino acid sequence of the given modified protein.

[0574] In some embodiments of the invention, the isolated nucleic acid encoding a modified capsid includes a nucleic acid encoding a modified AAV5 capsid protein VP3 comprising the substitution G34A (AAV5 Capsid VP3 G34A) that has the nucleotide sequence of SEQ ID No: 17 or any other nucleotide sequence encoding the corresponding amino acid sequence of the given modified protein.

[0575] In some embodiments of the invention, the isolated nucleic acid encoding a modified capsid includes a nucleic acid encoding a modified AAV5 capsid protein VP1 comprising the substitutions S2A, G226A and T711S (AAV5 Capsid VP1 S2A, G226A and T711S) that has the nucleotide sequence of SEQ ID No: 19 or any other nucleotide sequence encoding the corresponding amino acid sequence of the given modified protein.

[0576] In some embodiments of the invention, the isolated nucleic acid encoding a modified capsid includes a nucleic acid encoding a modified AAV5 capsid protein VP2 comprising the substitutions G90A and T575S (AAV5 Capsid VP2 G90A and T575S) that has the nucleotide sequence of SEQ ID No: 21 or any other nucleotide sequence encoding the corresponding amino acid sequence of the given modified protein.

[0577] In some embodiments of the invention, the isolated nucleic acid encoding a modified capsid includes a nucleic acid encoding a modified AAV5 capsid protein VP3 comprising the substitutions G34A T519S (AAV5 Capsid VP3 G34A T519S) that has the nucleotide sequence of SEQ ID No: 23 or any other nucleotide sequence encoding the corresponding amino acid sequence of the given modified protein.

[0578] In some embodiments of the invention, the isolated nucleic acid encoding a modified capsid includes a nucleic acid encoding a modified AAV5 capsid protein VP1 comprising the substitution D286E (AAV5 Capsid VP1 D286E) that has the nucleotide sequence of SEQ ID No: 25 or any other nucleotide sequence encoding the corresponding amino acid sequence of the given modified protein.

[0579] In some embodiments of the invention, the isolated nucleic acid encoding a modified capsid includes a nucleic acid encoding a modified AAV5 capsid protein VP2 comprising the substitution D150E (AAV5 Capsid VP2 D150E) that has the nucleotide sequence of SEQ ID No: 27 or any other nucleotide sequence encoding the corresponding amino acid sequence of the given modified protein.

[0580] In some embodiments of the invention, the isolated nucleic acid encoding a modified capsid includes a nucleic acid encoding a modified AAV5 capsid protein VP3 comprising the substitution D94E (AAV5 Capsid VP3 D94E) that has the nucleotide sequence of SEQ ID No: 29 or any other nucleotide sequence encoding the corresponding amino acid sequence of the given modified protein.

[0581] In some embodiments of the invention, the isolated nucleic acid encoding a modified capsid includes a nucleic acid encoding a modified AAV5 capsid protein VP1 comprising the substitutions S2A, D286E and T711S (AAV5 Capsid VP1 S2A, D286E and T711S) that has the nucleotide sequence of SEQ ID No: 31 or any other nucleotide sequence encoding the corresponding amino acid sequence of the given modified protein.

[0582] In some embodiments of the invention, the isolated nucleic acid encoding a modified capsid includes a nucleic acid encoding a modified AAV5 capsid protein VP2 comprising the substitutions D150E and T575S (AAV5 Capsid VP2 D150E and T575S) that has the nucleotide sequence of SEQ ID No: 33 or any other nucleotide sequence encoding the corresponding amino acid sequence of the given modified protein.

[0583] In some embodiments of the invention, the isolated nucleic acid encoding a modified capsid includes a nucleic acid encoding a modified AAV5 capsid protein VP3 comprising the substitutions D94E and T519S (AAV5 Capsid VP3 D94E and T519S) that has the nucleotide sequence of SEQ ID No: 35 or any other nucleotide sequence encoding the corresponding amino acid sequence of the given modified protein.

[0584] In some embodiments of the invention, the isolated nucleic acid encoding a modified capsid includes a nucleic acid encoding a modified AAV5 capsid protein VP1 comprising the substitution L341Y (AAV5 Capsid VP1 L341Y) that has the nucleotide sequence of SEQ ID No: 37 or any other nucleotide sequence encoding the corresponding amino acid sequence of the given modified protein.

[0585] In some embodiments of the invention, the isolated nucleic acid encoding a modified capsid includes a nucleic acid encoding a modified AAV5 capsid protein VP2 comprising the substitution L205Y (AAV5 Capsid VP2 L205Y) that has the nucleotide sequence of SEQ ID No: 39 or any other nucleotide sequence encoding the corresponding amino acid sequence of the given modified protein.

[0586] In some embodiments of the invention, the isolated nucleic acid encoding a modified capsid includes a nucleic acid encoding a modified AAV5 capsid protein VP3 comprising the substitution L149Y (AAV5 Capsid VP3 L149Y) that has the nucleotide sequence of SEQ ID No: 41 or any other nucleotide sequence encoding the corresponding amino acid sequence of the given modified protein.

[0587] In some embodiments of the invention, the isolated nucleic acid encoding a modified capsid includes a nucleic acid encoding a modified AAV5 capsid protein VP1 comprising the substitutions S2A, L341Y, T711S (AAV5 Capsid VP1 S2A, L341Y, T711S) that has the nucleotide sequence of SEQ ID No: 43 or any other nucleotide sequence encoding the corresponding amino acid sequence of the given modified protein.

[0588] In some embodiments of the invention, the isolated nucleic acid encoding a modified capsid includes a nucleic acid encoding a modified AAV5 capsid protein VP2 comprising the substitutions L205Y, T575S (AAV5 Capsid VP2 L205Y, T575S) that has the nucleotide sequence of SEQ ID No: 45 or any other nucleotide sequence encoding the corresponding amino acid sequence of the given modified protein.

[0589] In some embodiments of the invention, the isolated nucleic acid encoding a modified capsid includes a nucleic acid encoding a modified AAV5 capsid protein VP3 comprising the substitutions L149Y, T519S (AAV5 Capsid VP3 L149Y, T519S) that has the nucleotide sequence of SEQ ID No: 47 or any other nucleotide sequence encoding the corresponding amino acid sequence of the given modified protein.

[0590] In some embodiments of the invention, the isolated nucleic acid encoding a modified capsid includes a nucleic acid encoding a modified AAV5 capsid protein VP1 comprising the substitution C387V (AAV5 Capsid VP1 C387V) that has the nucleotide sequence of SEQ ID No: 49 or any other nucleotide sequence encoding the corresponding amino acid sequence of the given modified protein.

[0591] In some embodiments of the invention, the isolated nucleic acid encoding a modified capsid includes a nucleic acid encoding a modified AAV5 capsid protein VP2 comprising the substitution C251V (AAV5 Capsid VP2 C251V) that has the nucleotide sequence of SEQ ID No: 51 or any other nucleotide sequence encoding the corresponding amino acid sequence of the given modified protein.

[0592] In some embodiments of the invention, the isolated nucleic acid encoding a modified capsid includes a nucleic acid encoding a modified AAV5 capsid protein VP3 comprising the substitution C195V (AAV5 Capsid VP3 C195V) that has the nucleotide sequence of SEQ ID No: 53 or any other nucleotide sequence encoding the corresponding amino acid sequence of the given modified protein.

[0593] In some embodiments of the invention, the isolated nucleic acid encoding a modified capsid includes a nucleic acid encoding a modified AAV5 capsid protein VP1 comprising the substitutions S2A, C387V, T711S (AAV5 Capsid VP1 S2A, C387V, T711S) that has the nucleotide sequence of SEQ ID No: 55 or any other nucleotide sequence encoding the corresponding amino acid sequence of the given modified protein.

[0594] In some embodiments of the invention, the isolated nucleic acid encoding a modified capsid includes a nucleic acid encoding a modified AAV5 capsid protein VP2 comprising the substitutions C251V, T575S (AAV5 Capsid VP2 C251V, T575S) that has the nucleotide sequence of SEQ ID No: 57 or any other nucleotide sequence encoding the corresponding amino acid sequence of the given modified protein.

[0595] In some embodiments of the invention, the isolated nucleic acid encoding a modified capsid includes a nucleic acid encoding a modified AAV5 capsid protein VP3 comprising the substitutions C195V, T519S (AAV5 Capsid VP3 C195V, T519S) that has the nucleotide sequence of SEQ ID No: 59 or any other nucleotide sequence encoding the corresponding amino acid sequence of the given modified protein.

[0596] In some embodiments of the invention, the isolated nucleic acid encoding a modified capsid includes a nucleic acid encoding a modified AAV5 capsid protein VP1 comprising the substitution Q421H (AAV5 Capsid VP1 Q421H) that has the nucleotide sequence of SEQ ID No: 61 or any other nucleotide sequence encoding the corresponding amino acid sequence of the given modified protein.

[0597] In some embodiments of the invention, the isolated nucleic acid encoding a modified capsid includes a nucleic acid encoding a modified AAV5 capsid protein VP2 comprising the substitution Q285H (AAV5 Capsid VP2 Q285H) that has the nucleotide sequence of SEQ ID No: 63 or any other nucleotide sequence encoding the corresponding amino acid sequence of the given modified protein.

[0598] In some embodiments of the invention, the isolated nucleic acid encoding a modified capsid includes a nucleic acid encoding a modified AAV5 capsid protein VP3 comprising the substitution Q229H (AAV5 Capsid VP3 Q229H) that has the nucleotide sequence of SEQ ID No: 65 or any other nucleotide sequence encoding the corresponding amino acid sequence of the given modified protein.

[0599] In some embodiments of the invention, the isolated nucleic acid encoding a modified capsid includes a nucleic acid encoding a modified AAV5 capsid protein VP1 comprising the substitutions S2A Q421H T711S (AAV5 Capsid VP1 S2A Q421H T711S) that has the nucleotide sequence of SEQ ID No: 67 or any other nucleotide sequence encoding the corresponding amino acid sequence of the given modified protein.

[0600] In some embodiments of the invention, the isolated nucleic acid encoding a modified capsid includes a nucleic acid encoding a modified AAV5 capsid protein VP2 comprising the substitutions Q285H T575S (AAV5 Capsid VP2 Q285H T575S) that has the nucleotide sequence of SEQ ID No: 69 or any other nucleotide sequence encoding the corresponding amino acid sequence of the given modified protein.

[0601] In some embodiments of the invention, the isolated nucleic acid encoding a modified capsid includes a nucleic acid encoding a modified AAV5 capsid protein VP3 comprising the substitutions Q229H T519S (AAV5 Capsid VP3 Q229H T519S) that has the nucleotide sequence of SEQ ID No: 71 or any other nucleotide sequence encoding the corresponding amino acid sequence of the given modified protein.

[0602] In some embodiments of the invention, the isolated nucleic acid encoding a modified capsid includes a nucleic acid encoding a modified AAV5 capsid protein VP1 comprising the substitution P466T (AAV5 Capsid VP1 P466T) that has the nucleotide sequence of SEQ ID No: 73 or any other nucleotide sequence encoding the corresponding amino acid sequence of the given modified protein.

[0603] In some embodiments of the invention, the isolated nucleic acid encoding a modified capsid includes a nucleic acid encoding a modified AAV5 capsid protein VP2 comprising the substitution P330T (AAV5 Capsid VP2 P330T) that has the nucleotide sequence of SEQ ID No: 75 or any other nucleotide sequence encoding the corresponding amino acid sequence of the given modified protein.

[0604] In some embodiments of the invention, the isolated nucleic acid encoding a modified capsid includes a nucleic acid encoding a modified AAV5 capsid protein VP3 comprising the substitution P274T (AAV5 Capsid VP3 P274T) that has the nucleotide sequence of SEQ ID No: 77 or any other nucleotide sequence encoding the corresponding amino acid sequence of the given modified protein.

[0605] In some embodiments of the invention, the isolated nucleic acid encoding a modified capsid includes a nucleic acid encoding a modified AAV5 capsid protein VP1 comprising the substitutions S2A P466T T711S (AAV5 Capsid VP1 S2A P466T T711S) that has the nucleotide sequence of SEQ ID No: 79 or any other nucleotide sequence encoding the corresponding amino acid sequence of the given modified protein.

[0606] In some embodiments of the invention, the isolated nucleic acid encoding a modified capsid includes a nucleic acid encoding a modified AAV5 capsid protein VP2 comprising the substitutions P330T T575S (AAV5 Capsid VP2 P330T T575S) that has the nucleotide sequence of SEQ ID No: 81 or any other nucleotide sequence encoding the corresponding amino acid sequence of the given modified protein.

[0607] In some embodiments of the invention, the isolated nucleic acid encoding a modified capsid includes a nucleic acid encoding a modified AAV5 capsid protein VP3 comprising the substitutions P274T T519S (AAV5 Capsid VP3 P274T T519S) that has the nucleotide sequence of SEQ ID No: 83 or any other nucleotide sequence encoding the corresponding amino acid sequence of the given modified protein.

[0608] In some embodiments of the invention, the isolated nucleic acid encoding a modified capsid includes a nucleic acid encoding a modified AAV5 capsid protein VP1 comprising the substitution S594Q (AAV5 Capsid VP1 S594Q) that has the nucleotide sequence of SEQ ID No: 85 or any other nucleotide sequence encoding the corresponding amino acid sequence of the given modified protein.

[0609] In some embodiments of the invention, the isolated nucleic acid encoding a modified capsid includes a nucleic acid encoding a modified AAV5 capsid protein VP2 comprising the substitution S458Q (AAV5 Capsid VP2 S458Q) that has the nucleotide sequence of SEQ ID No: 87 or any other nucleotide sequence encoding the corresponding amino acid sequence of the given modified protein.

[0610] In some embodiments of the invention, the isolated nucleic acid encoding a modified capsid includes a nucleic acid encoding a modified AAV5 capsid protein VP3 comprising the substitution S402Q (AAV5 Capsid VP3 S402Q) that has the nucleotide sequence of SEQ ID No: 89 or any other nucleotide sequence encoding the corresponding amino acid sequence of the given modified protein.

[0611] In some embodiments of the invention, the isolated nucleic acid encoding a modified capsid includes a nucleic acid encoding a modified AAV5 capsid protein VP1 comprising the substitutions S2A S594Q T711S (AAV5 Capsid VP1 S2A S594Q T711S) that has the nucleotide sequence of SEQ ID No: 91 or any other nucleotide sequence encoding the corresponding amino acid sequence of the given modified protein.

[0612] In some embodiments of the invention, the isolated nucleic acid encoding a modified capsid includes a nucleic acid encoding a modified AAV5 capsid protein VP2 comprising the substitutions S458Q T575S (AAV5 Capsid VP2 S458Q T575S) that has the nucleotide sequence of SEQ ID No: 93 or any other nucleotide sequence encoding the corresponding amino acid sequence of the given modified protein.

[0613] In some embodiments of the invention, the isolated nucleic acid encoding a modified capsid includes a nucleic acid encoding a modified AAV5 capsid protein VP3 comprising the substitutions S402Q T519S (AAV5 Capsid VP3 S402Q T519S) that has the nucleotide sequence of SEQ ID No: 95 or any other nucleotide sequence encoding the corresponding amino acid sequence of the given modified protein.

[0614] In some embodiments of the invention, the isolated nucleic acid encoding a modified capsid includes a nucleic acid encoding a modified AAV5 capsid protein VP1 comprising the substitutions T614L (AAV5 Capsid VP1 T614L) that has the nucleotide sequence of SEQ ID No: 97 or any other nucleotide sequence encoding the corresponding amino acid sequence of the given modified protein.

[0615] In some embodiments of the invention, the isolated nucleic acid encoding a modified capsid includes a nucleic acid encoding a modified AAV5 capsid protein VP2 comprising the substitutions T478L (AAV5 Capsid VP2 T478L) that has the nucleotide sequence of SEQ ID No: 99 or any other nucleotide sequence encoding the corresponding amino acid sequence of the given modified protein.

[0616] In some embodiments of the invention, the isolated nucleic acid encoding a modified capsid includes a nucleic acid encoding a modified AAV5 capsid protein VP3 comprising the substitutions T422L (AAV5 Capsid VP3 T422L) that has the nucleotide sequence of SEQ ID No: 101 or any other nucleotide sequence encoding the corresponding amino acid sequence of the given modified protein.

[0617] In some embodiments of the invention, the isolated nucleic acid encoding a modified capsid includes a nucleic acid encoding a modified AAV5 capsid protein VP1 comprising the substitutions S2A T614L T711S (AAV5 Capsid VP1 S2A T614L T711S) that has the nucleotide sequence of SEQ ID No: 103 or any other nucleotide sequence encoding the corresponding amino acid sequence of the given modified protein.

[0618] In some embodiments of the invention, the isolated nucleic acid encoding a modified capsid includes a nucleic acid encoding a modified AAV5 capsid protein VP2 comprising the substitutions T478L T575S (AAV5 Capsid VP2 T478L T575S) that has the nucleotide sequence of SEQ ID No: 105 or any other nucleotide sequence encoding the corresponding amino acid sequence of the given modified protein.

[0619] In some embodiments of the invention, the isolated nucleic acid encoding a modified capsid includes a nucleic acid encoding a modified AAV5 capsid protein VP3 comprising the substitutions (AAV5 Capsid VP3 T422L T519S) that has the nucleotide sequence of SEQ ID No: 107 or any other nucleotide sequence encoding the corresponding amino acid sequence of the given modified protein.

[0620] In some embodiments of the invention, the isolated nucleic acid encoding a modified capsid includes a nucleic acid encoding a modified AAV5 capsid protein VP1 comprising the substitution N679K (AAV5 Capsid VP1 N679K) that has the nucleotide sequence of SEQ ID No: 109 or any other nucleotide sequence encoding the corresponding amino acid sequence of the given modified protein.

[0621] In some embodiments of the invention, the isolated nucleic acid encoding a modified capsid includes a nucleic acid encoding a modified AAV5 capsid protein VP2 comprising the substitution N543K (AAV5 Capsid VP2 N543K) that has the nucleotide sequence of SEQ ID No: 111 or any other nucleotide sequence encoding the corresponding amino acid sequence of the given modified protein.

[0622] In some embodiments of the invention, the isolated nucleic acid encoding a modified capsid includes a nucleic acid encoding a modified AAV5 capsid protein VP3 comprising the substitution N487K (AAV5 Capsid VP3 N487K) that has the nucleotide sequence of SEQ ID No: 113 or any other nucleotide sequence encoding the corresponding amino acid sequence of the given modified protein.

[0623] In some embodiments of the invention, the isolated nucleic acid encoding a modified capsid includes a nucleic acid encoding a modified AAV5 capsid protein VP1 comprising the substitutions S2A N679K T711S (AAV5 Capsid VP1 S2A N679K T711S) that has the nucleotide sequence of SEQ ID No: 115 or any other nucleotide sequence encoding the corresponding amino acid sequence of the given modified protein.

[0624] In some embodiments of the invention, the isolated nucleic acid encoding a modified capsid includes a nucleic acid encoding a modified AAV5 capsid protein VP2 comprising the substitutions N543K T575S (AAV5 Capsid VP2 N543K T575S) that has the nucleotide sequence of SEQ ID No: 117 or any other nucleotide sequence encoding the corresponding amino acid sequence of the given modified protein.

[0625] In some embodiments of the invention, the isolated nucleic acid encoding a modified capsid includes a nucleic acid encoding a modified AAV5 capsid protein VP3 comprising the substitutions N487K T519S (AAV5 Capsid VP3 N487K T519S) that has the nucleotide sequence of SEQ ID No: 119 or any other nucleotide sequence encoding the corresponding amino acid sequence of the given modified protein.

[0626] In some embodiments of the invention, the isolated nucleic acid encoding a modified capsid includes a nucleic acid encoding a modified AAV5 capsid protein VP1 comprising the substitution P723V (AAV5 Capsid VP1 P723V) that has the nucleotide sequence of SEQ ID No: 121 or any other nucleotide sequence encoding the corresponding amino acid sequence of the given modified protein.

[0627] In some embodiments of the invention, the isolated nucleic acid encoding a modified capsid includes a nucleic acid encoding a modified AAV5 capsid protein VP2 comprising the substitution P587V (AAV5 Capsid VP2 P587V) that has the nucleotide sequence of SEQ ID No: 123 or any other nucleotide sequence encoding the corresponding amino acid sequence of the given modified protein.

[0628] In some embodiments of the invention, the isolated nucleic acid encoding a modified capsid includes a nucleic acid encoding a modified AAV5 capsid protein VP3 comprising the substitution P531V (AAV5 Capsid VP3 P531V) that has the nucleotide sequence of SEQ ID No: 125 or any other nucleotide sequence encoding the corresponding amino acid sequence of the given modified protein.

[0629] In some embodiments of the invention, the isolated nucleic acid encoding a modified capsid includes a nucleic acid encoding a modified AAV5 capsid protein VP1 comprising the substitutions P723V T711S (AAV5 Capsid VP1 S2A P723V T711S) that has the nucleotide sequence of SEQ ID No: 127 or any other nucleotide sequence encoding the corresponding amino acid sequence of the given modified protein.

[0630] In some embodiments of the invention, the isolated nucleic acid encoding a modified capsid includes a nucleic acid encoding a modified AAV5 capsid protein VP2 comprising the substitutions P587V T575S (AAV5 Capsid VP2 P587V T575S) that has the nucleotide sequence of SEQ ID No: 129 or any other nucleotide sequence encoding the corresponding amino acid sequence of the given modified protein.

[0631] In some embodiments of the invention, the isolated nucleic acid encoding a modified capsid includes a nucleic acid encoding a modified AAV5 capsid protein VP3 comprising the substitutions P531V T519S (AAV5 Capsid VP3 P531V T519S) that has the nucleotide sequence of SEQ ID No: 131 or any other nucleotide sequence encoding the corresponding amino acid sequence of the given modified protein.

[0632] In some embodiments of the invention, the isolated nucleic acid encoding a modified capsid includes a nucleic acid encoding a modified AAV5 capsid protein VP1 comprising the substitution V431Y (AAV5 Capsid VP1 V431Y) that has the nucleotide sequence of SEQ ID No: 133 or any other nucleotide sequence encoding the corresponding amino acid sequence of the given modified protein.

[0633] In some embodiments of the invention, the isolated nucleic acid encoding a modified capsid includes a nucleic acid encoding a modified AAV5 capsid protein VP2 comprising the substitution V295Y (AAV5 Capsid VP2 V295Y) that has the nucleotide sequence of SEQ ID No: 135 or any other nucleotide sequence encoding the corresponding amino acid sequence of the given modified protein.

[0634] In some embodiments of the invention, the isolated nucleic acid encoding a modified capsid includes a nucleic acid encoding a modified AAV5 capsid protein VP3 comprising the substitution V239Y (AAV5 Capsid VP3 V239Y) that has the nucleotide sequence of SEQ ID No: 137 or any other nucleotide sequence encoding the corresponding amino acid sequence of the given modified protein.

[0635] In some embodiments of the invention, the isolated nucleic acid encoding a modified capsid includes a nucleic acid encoding a modified AAV5 capsid protein VP1 comprising the substitutions S2A V431Y T711S (AAV5 Capsid VP1 S2A V431Y T711S) that has the nucleotide sequence of SEQ ID No: 139 or any other nucleotide sequence encoding the corresponding amino acid sequence of the given modified protein.

[0636] In some embodiments of the invention, the isolated nucleic acid encoding a modified capsid includes a nucleic acid encoding a modified AAV5 capsid protein VP2 comprising the substitutions V295Y T575S (AAV5 Capsid VP2 V295Y T575S) that has the nucleotide sequence of SEQ ID No: 141 or any other nucleotide sequence encoding the corresponding amino acid sequence of the given modified protein.

[0637] In some embodiments of the invention, the isolated nucleic acid encoding a modified capsid includes a nucleic acid encoding a modified AAV5 capsid protein VP3 comprising the substitutions V239Y T519S (AAV5 Capsid VP3 V239Y T519S) that has the nucleotide sequence of SEQ ID No: 143 or any other nucleotide sequence encoding the corresponding amino acid sequence of the given modified protein.

[0638] In some embodiments of the invention, the isolated nucleic acid encoding a modified capsid includes a nucleic acid encoding a modified AAV5 capsid protein VP1 comprising the substitution A616D (AAV5 Capsid VP1 A616D) that has the nucleotide sequence of SEQ ID No: 145 or any other nucleotide sequence encoding the corresponding amino acid sequence of the given modified protein.

[0639] In some embodiments of the invention, the isolated nucleic acid encoding a modified capsid includes a nucleic acid encoding a modified AAV5 capsid protein VP2 comprising the substitution A480D (AAV5 Capsid VP2 A480D) that has the nucleotide sequence of SEQ ID No: 147 or any other nucleotide sequence encoding the corresponding amino acid sequence of the given modified protein.

[0640] In some embodiments of the invention, the isolated nucleic acid encoding a modified capsid includes a nucleic acid encoding a modified AAV5 capsid protein VP3 comprising the substitution A424D (AAV5 Capsid VP3 A424D) that has the nucleotide sequence of SEQ ID No: 149 or any other nucleotide sequence encoding the corresponding amino acid sequence of the given modified protein.

[0641] In some embodiments of the invention, the isolated nucleic acid encoding a modified capsid includes a nucleic acid encoding a modified AAV5 capsid protein VP1 comprising the substitutions S2A A616D T711S (AAV5 Capsid VP1 S2A A616D T711S) that has the nucleotide sequence of SEQ ID No: 151 or any other nucleotide sequence encoding the corresponding amino acid sequence of the given modified protein.

[0642] In some embodiments of the invention, the isolated nucleic acid encoding a modified capsid includes a nucleic acid encoding a modified AAV5 capsid protein VP2 comprising the substitutions A480D T575S (AAV5 Capsid VP2 A480D T575S) that has the nucleotide sequence of SEQ ID No: 153 or any other nucleotide sequence encoding the corresponding amino acid sequence of the given modified protein.

[0643] In some embodiments of the invention, the isolated nucleic acid encoding a modified capsid includes a nucleic acid encoding a modified AAV5 capsid protein VP3 comprising the substitutions A424D T519S (AAV5 Capsid VP3 A424D T519S) that has the nucleotide sequence of SEQ ID No: 155 or any other nucleotide sequence encoding the corresponding amino acid sequence of the given modified protein.

[0644] In some embodiments of the invention, the isolated nucleic acid encoding a modified capsid includes a nucleic acid encoding a modified AAV5 capsid protein VP1 comprising the substitution W683R (AAV5 Capsid VP1 W683R) that has the nucleotide sequence of SEQ ID No: 157 or any other nucleotide sequence encoding the corresponding amino acid sequence of the given modified protein.

[0645] In some embodiments of the invention, the isolated nucleic acid encoding a modified capsid includes a nucleic acid encoding a modified AAV5 capsid protein VP2 comprising the substitution W547R (AAV5 Capsid VP2 W547R) that has the nucleotide sequence of SEQ ID No: 159 or any other nucleotide sequence encoding the corresponding amino acid sequence of the given modified protein.

[0646] In some embodiments of the invention, the isolated nucleic acid encoding a modified capsid includes a nucleic acid encoding a modified AAV5 capsid protein VP3 comprising the substitution W491R (AAV5 Capsid VP3 W491R) that has the nucleotide sequence of SEQ ID No: 161 or any other nucleotide sequence encoding the corresponding amino acid sequence of the given modified protein.

[0647] In some embodiments of the invention, the isolated nucleic acid encoding a modified capsid includes a nucleic acid encoding a modified AAV5 capsid protein VP1 comprising the substitutions S2A W683R T711S (AAV5 Capsid VP1 S2A W683R T711S) that has the nucleotide sequence of SEQ ID No: 163 or any other nucleotide sequence encoding the corresponding amino acid sequence of the given modified protein.

[0648] In some embodiments of the invention, the isolated nucleic acid encoding a modified capsid includes a nucleic acid encoding a modified AAV5 capsid protein VP2 comprising the substitutions W547R T575S (AAV5 Capsid VP2 W547R T575S) that has the nucleotide sequence of SEQ ID No: 165 or any other nucleotide sequence encoding the corresponding amino acid sequence of the given modified protein.

[0649] In some embodiments of the invention, the isolated nucleic acid encoding a modified capsid includes a nucleic acid encoding a modified AAV5 capsid protein VP3 comprising the substitutions W491R T519S (AAV5 Capsid VP3 W491R T519S) that has the nucleotide sequence of SEQ ID No: 167 or any other nucleotide sequence encoding the corresponding amino acid sequence of the given modified protein.

[0650] In some embodiments of the invention, the isolated nucleic acid encoding a modified capsid includes a nucleic acid encoding a modified AAV5 capsid protein VP1 comprising the substitution S222A (AAV5 Capsid VP1 S222A) that has the nucleotide sequence of SEQ ID No: 169 or any other nucleotide sequence encoding the corresponding amino acid sequence of the given modified protein.

[0651] In some embodiments of the invention, the isolated nucleic acid encoding a modified capsid includes a nucleic acid encoding a modified AAV5 capsid protein VP2 comprising the substitution S86A (AAV5 Capsid VP2 S86A) that has the nucleotide sequence of SEQ ID No: 171 or any other nucleotide sequence encoding the corresponding amino acid sequence of the given modified protein.

[0652] In some embodiments of the invention, the isolated nucleic acid encoding a modified capsid includes a nucleic acid encoding a modified AAV5 capsid protein VP3 comprising the substitution S30A (AAV5 Capsid VP3 S30A) that has the nucleotide sequence of SEQ ID No: 173 or any other nucleotide sequence encoding the corresponding amino acid sequence of the given modified protein.

[0653] In some embodiments of the invention, the isolated nucleic acid encoding a modified capsid includes a nucleic acid encoding a modified AAV5 capsid protein VP1 comprising the substitutions S2A S222A T711S (AAV5 Capsid VP1 S2A S222A T711S) that has the nucleotide sequence of SEQ ID No: 175 or any other nucleotide sequence encoding the corresponding amino acid sequence of the given modified protein.

[0654] In some embodiments of the invention, the isolated nucleic acid encoding a modified capsid includes a nucleic acid encoding a modified AAV5 capsid protein VP2 comprising the substitutions S86A T575S (AAV5 Capsid VP2 S86A T575S) that has the nucleotide sequence of SEQ ID No: 177 or any other nucleotide sequence encoding the corresponding amino acid sequence of the given modified protein.

[0655] In some embodiments of the invention, the isolated nucleic acid encoding a modified capsid includes a nucleic acid encoding a modified AAV5 capsid protein VP3 comprising the substitutions S30A T519S (AAV5 Capsid VP3 S30A T519S) that has the nucleotide sequence of SEQ ID No: 179 or any other nucleotide sequence encoding the corresponding amino acid sequence of the given modified protein.

[0656] In some embodiments of the invention, the isolated nucleic acid encoding a modified capsid includes a nucleic acid encoding a modified AAV5 capsid protein VP1 comprising the substitution R285L (AAV5 Capsid VP1 R285L) that has the nucleotide sequence of SEQ ID No: 181 or any other nucleotide sequence encoding the corresponding amino acid sequence of the given modified protein.

[0657] In some embodiments of the invention, the isolated nucleic acid encoding a modified capsid includes a nucleic acid encoding a modified AAV5 capsid protein VP2 comprising the substitution R149L (AAV5 Capsid VP2 R149L) that has the nucleotide sequence of SEQ ID No: 183 or any other nucleotide sequence encoding the corresponding amino acid sequence of the given modified protein.

[0658] In some embodiments of the invention, the isolated nucleic acid encoding a modified capsid includes a nucleic acid encoding a modified AAV5 capsid protein VP3 comprising the substitution R93L (AAV5 Capsid VP3 R93L) that has the nucleotide sequence of SEQ ID No: 185 or any other nucleotide sequence encoding the corresponding amino acid sequence of the given modified protein.

[0659] In some embodiments of the invention, the isolated nucleic acid encoding a modified capsid includes a nucleic acid encoding a modified AAV5 capsid protein VP1 comprising the substitutions S2A R285L T711S (AAV5 Capsid VP1 S2A R285L T711S) that has the nucleotide sequence of SEQ ID No: 187 or any other nucleotide sequence encoding the corresponding amino acid sequence of the given modified protein.

[0660] In some embodiments of the invention, the isolated nucleic acid encoding a modified capsid includes a nucleic acid encoding a modified AAV5 capsid protein VP2 comprising the substitutions R149L T575S (AAV5 Capsid VP2 R149L T575S) that has the nucleotide sequence of SEQ ID No: 189 or any other nucleotide sequence encoding the corresponding amino acid sequence of the given modified protein.

[0661] In some embodiments of the invention, the isolated nucleic acid encoding a modified capsid includes a nucleic acid encoding a modified AAV5 capsid protein VP3 comprising the substitutions R93L T519S (AAV5 Capsid VP3 R93L T519S) that has the nucleotide sequence of SEQ ID No: 191 or any other nucleotide sequence encoding the corresponding amino acid sequence of the given modified protein.

[0662] In some embodiments of the invention, the isolated nucleic acid encoding a modified capsid includes a nucleic acid encoding a modified AAV5 capsid protein VP1 comprising the substitution Q340A (AAV5 Capsid VP1 Q340A) that has the nucleotide sequence of SEQ ID No: 193 or any other nucleotide sequence encoding the corresponding amino acid sequence of the given modified protein.

[0663] In some embodiments of the invention, the isolated nucleic acid encoding a modified capsid includes a nucleic acid encoding a modified AAV5 capsid protein VP2 comprising the substitution (AAV5 Capsid VP2 Q204A) that has the nucleotide sequence of SEQ ID No: 195 or any other nucleotide sequence encoding the corresponding amino acid sequence of the given modified protein.

[0664] In some embodiments of the invention, the isolated nucleic acid encoding a modified capsid includes a nucleic acid encoding a modified AAV5 capsid protein VP3 comprising the substitution Q148A (AAV5 Capsid VP3 Q148A) that has the nucleotide sequence of SEQ ID No: 197 or any other nucleotide sequence encoding the corresponding amino acid sequence of the given modified protein.

[0665] In some embodiments of the invention, the isolated nucleic acid encoding a modified capsid includes a nucleic acid encoding a modified AAV5 capsid protein VP1 comprising the substitutions S2A Q340A T711S (AAV5 Capsid VP1 S2A Q340A T711S) that has the nucleotide sequence of SEQ ID No: 199 or any other nucleotide sequence encoding the corresponding amino acid sequence of the given modified protein.

[0666] In some embodiments of the invention, the isolated nucleic acid encoding a modified capsid includes a nucleic acid encoding a modified AAV5 capsid protein VP2 comprising the substitutions Q204A T575S (AAV5 Capsid VP2 Q204A T575S) that has the nucleotide sequence of SEQ ID No: 201 or any other nucleotide sequence encoding the corresponding amino acid sequence of the given modified protein.

[0667] In some embodiments of the invention, the isolated nucleic acid encoding a modified capsid includes a nucleic acid encoding a modified AAV5 capsid protein VP3 comprising the substitutions Q148A T519S (AAV5 Capsid VP3 Q148A T519S) that has the nucleotide sequence of SEQ ID No: 203 or any other nucleotide sequence encoding the corresponding amino acid sequence of the given modified protein.

[0668] In some embodiments of the invention, the isolated nucleic acid encoding a modified capsid includes a nucleic acid encoding a modified AAV5 capsid protein VP1 comprising the substitution S420F (AAV5 Capsid VP1 S420F) that has the nucleotide sequence of SEQ ID No: 205 or any other nucleotide sequence encoding the corresponding amino acid sequence of the given modified protein.

[0669] In some embodiments of the invention, the isolated nucleic acid encoding a modified capsid includes a nucleic acid encoding a modified AAV5 capsid protein VP2 comprising the substitution S284F (AAV5 Capsid VP2 S284F) that has the nucleotide sequence of SEQ ID No: 207 or any other nucleotide sequence encoding the corresponding amino acid sequence of the given modified protein.

[0670] In some embodiments of the invention, the isolated nucleic acid encoding a modified capsid includes a nucleic acid encoding a modified AAV5 capsid protein VP3 comprising the substitution S228F (AAV5 Capsid VP3 S228F) that has the nucleotide sequence of SEQ ID No: 209 or any other nucleotide sequence encoding the corresponding amino acid sequence of the given modified protein.

[0671] In some embodiments of the invention, the isolated nucleic acid encoding a modified capsid includes a nucleic acid encoding a modified AAV5 capsid protein VP1 comprising the substitutions S2A S420F T711S (AAV5 Capsid VP1 S2A S420FT711S) that has the nucleotide sequence of SEQ ID No: 211 or any other nucleotide sequence encoding the corresponding amino acid sequence of the given modified protein.

[0672] In some embodiments of the invention, the isolated nucleic acid encoding a modified capsid includes a nucleic acid encoding a modified AAV5 capsid protein VP2 comprising the substitutions S284F T575S (AAV5 Capsid VP2 S284F T575S) that has the nucleotide sequence of SEQ ID No: 213 or any other nucleotide sequence encoding the corresponding amino acid sequence of the given modified protein.

[0673] In some embodiments of the invention, the isolated nucleic acid encoding a modified capsid includes a nucleic acid encoding a modified AAV5 capsid protein VP3 comprising the substitutions S228F T519S (AAV5 Capsid VP3 S228F T519S) that has the nucleotide sequence of SEQ ID No: 215 or any other nucleotide sequence encoding the corresponding amino acid sequence of the given modified protein.

[0674] In some embodiments of the invention, the isolated nucleic acid encoding a modified capsid includes a nucleic acid encoding a modified AAV5 capsid protein VP1 comprising the substitution S680A (AAV5 Capsid VP1 S680A) that has the nucleotide sequence of SEQ ID No: 217 or any other nucleotide sequence encoding the corresponding amino acid sequence of the given modified protein.

[0675] In some embodiments of the invention, the isolated nucleic acid encoding a modified capsid includes a nucleic acid encoding a modified AAV5 capsid protein VP2 comprising the substitution S544A (AAV5 Capsid VP2 S544A) that has the nucleotide sequence of SEQ ID No: 219 or any other nucleotide sequence encoding the corresponding amino acid sequence of the given modified protein.

[0676] In some embodiments of the invention, the isolated nucleic acid encoding a modified capsid includes a nucleic acid encoding a modified AAV5 capsid protein VP3 comprising the substitution S488A (AAV5 Capsid VP3 S488A) that has the nucleotide sequence of SEQ ID No: 221 or any other nucleotide sequence encoding the corresponding amino acid sequence of the given modified protein.

[0677] In some embodiments of the invention, the isolated nucleic acid encoding a modified capsid includes a nucleic acid encoding a modified AAV5 capsid protein VP1 comprising the substitutions S2A S680A T711S (AAV5 Capsid VP1 S2A S680A T711S) that has the nucleotide sequence of SEQ ID No: 223 or any other nucleotide sequence encoding the corresponding amino acid sequence of the given modified protein.

[0678] In some embodiments of the invention, the isolated nucleic acid encoding a modified capsid includes a nucleic acid encoding a modified AAV5 capsid protein VP2 comprising the substitutions S544A T575S (AAV5 Capsid VP2 S544A T575S) that has the nucleotide sequence of SEQ ID No: 225 or any other nucleotide sequence encoding the corresponding amino acid sequence of the given modified protein.

[0679] In some embodiments of the invention, the isolated nucleic acid encoding a modified capsid includes a nucleic acid encoding a modified AAV5 capsid protein VP3 comprising the substitutions S488A T519S (AAV5 Capsid VP3 S488A T519S) that has the nucleotide sequence of SEQ ID No: 227 or any other nucleotide sequence encoding the corresponding amino acid sequence of the given modified protein.

[0680] In some embodiments of the invention, the isolated nucleic acid encoding a modified capsid includes a nucleic acid encoding a modified AAV5 capsid protein VP1 comprising the substitution T721V (AAV5 Capsid VP1 T721V) that has the nucleotide sequence of SEQ ID No: 229 or any other nucleotide sequence encoding the corresponding amino acid sequence of the given modified protein.

[0681] In some embodiments of the invention, the isolated nucleic acid encoding a modified capsid includes a nucleic acid encoding a modified AAV5 capsid protein VP2 comprising the substitution T585V (AAV5 Capsid VP2 T585V) that has the nucleotide sequence of SEQ ID No: 231 or any other nucleotide sequence encoding the corresponding amino acid sequence of the given modified protein.

[0682] In some embodiments of the invention, the isolated nucleic acid encoding a modified capsid includes a nucleic acid encoding a modified AAV5 capsid protein VP3 comprising the substitution T529V (AAV5 Capsid VP3 T529V) that has the nucleotide sequence of SEQ ID No: 233 or any other nucleotide sequence encoding the corresponding amino acid sequence of the given modified protein.

[0683] In some embodiments of the invention, the isolated nucleic acid encoding a modified capsid includes a nucleic acid encoding a modified AAV5 capsid protein VP1 comprising the substitutions S2A T721V T711S (AAV5 Capsid VP1 S2A T721V T711S) that has the nucleotide sequence of SEQ ID No: 235 or any other nucleotide sequence encoding the corresponding amino acid sequence of the given modified protein.

[0684] In some embodiments of the invention, the isolated nucleic acid encoding a modified capsid includes a nucleic acid encoding a modified AAV5 capsid protein VP2 comprising the substitutions T585V T575S (AAV5 Capsid VP2 T585V T575S) that has the nucleotide sequence of SEQ ID No: 237 or any other nucleotide sequence encoding the corresponding amino acid sequence of the given modified protein.

[0685] In some embodiments of the invention, the isolated nucleic acid encoding a modified capsid includes a nucleic acid encoding a modified AAV5 capsid protein VP3 comprising the substitutions T529V T519S (AAV5 Capsid VP3 T529V T519S) that has the nucleotide sequence of SEQ ID No: 239 or any other nucleotide sequence encoding the corresponding amino acid sequence of the given modified protein.

[0686] In some embodiments of the invention, the isolated nucleic acid encoding a modified capsid includes a nucleic acid encoding a modified AAV9 capsid protein VP1 comprising the substitution Q351K (AAV9 Capsid VP1 Q351K) that has the nucleotide sequence of SEQ ID No: 241 or any other nucleotide sequence encoding the corresponding amino acid sequence of the given modified protein.

[0687] In some embodiments of the invention, the isolated nucleic acid encoding a modified capsid includes a nucleic acid encoding a modified AAV9 capsid protein VP2 comprising the substitution Q214K (AAV9 Capsid VP2 Q214K) that has the nucleotide sequence of SEQ ID No: 243 or any other nucleotide sequence encoding the corresponding amino acid sequence of the given modified protein.

[0688] In some embodiments of the invention, the isolated nucleic acid encoding a modified capsid includes a nucleic acid encoding a modified AAV9 capsid protein VP3 comprising the substitution Q149K (AAV9 Capsid VP3 Q149K) that has the nucleotide sequence of SEQ ID No: 245 or any other nucleotide sequence encoding the corresponding amino acid sequence of the given modified protein.

[0689] In some embodiments of the invention, the isolated nucleic acid encoding a modified capsid includes a nucleic acid encoding a modified AAV9 capsid protein VP1 comprising the substitution Q351R (AAV9 Capsid VP1 Q351R) that has the nucleotide sequence of SEQ ID No: 247 or any other nucleotide sequence encoding the corresponding amino acid sequence of the given modified protein.

[0690] In some embodiments of the invention, the isolated nucleic acid encoding a modified capsid includes a nucleic acid encoding a modified AAV9 capsid protein VP2 comprising the substitution Q214R (AAV9 Capsid VP2 Q214R) that has the nucleotide sequence of SEQ ID No: 249 or any other nucleotide sequence encoding the corresponding amino acid sequence of the given modified protein.

[0691] In some embodiments of the invention, the isolated nucleic acid encoding a modified capsid includes a nucleic acid encoding a modified AAV5 capsid protein VP3 comprising the Q149R (AAV9 Capsid VP3 Q149R) that has the nucleotide sequence of SEQ ID No: 251 or any other nucleotide sequence encoding the corresponding amino acid sequence of the given modified protein.

[0692] In some embodiments of the invention, the isolated nucleic acid encoding a modified capsid includes a nucleic acid encoding a modified AAV9 capsid protein VP1 comprising the substitution S232T (AAV9 Capsid VP1 S232T) that has the nucleotide sequence of SEQ ID No: 253 or any other nucleotide sequence encoding the corresponding amino acid sequence of the given modified protein.

[0693] In some embodiments of the invention, the isolated nucleic acid encoding a modified capsid includes a nucleic acid encoding a modified AAV9 capsid protein VP2 comprising the substitution S95T (AAV9 Capsid VP2 S95T) that has the nucleotide sequence of SEQ ID No: 255 or any other nucleotide sequence encoding the corresponding amino acid sequence of the given modified protein.

[0694] In some embodiments of the invention, the isolated nucleic acid encoding a modified capsid includes a nucleic acid encoding a modified AAV9 capsid protein VP3 comprising the substitution S30T (AAV9 Capsid VP3 S30T) that has the nucleotide sequence of SEQ ID No: 257 or any other nucleotide sequence encoding the corresponding amino acid sequence of the given modified protein.

[0695] In some embodiments of the invention, the isolated nucleic acid encoding a modified capsid includes a nucleic acid encoding a modified AAV9 capsid protein VP1 comprising the substitution D297E (AAV9 Capsid VP1 D297E) that has the nucleotide sequence of SEQ ID No: 259 or any other nucleotide sequence encoding the corresponding amino acid sequence of the given modified protein.

[0696] In some embodiments of the invention, the isolated nucleic acid encoding a modified capsid includes a nucleic acid encoding a modified AAV9 capsid protein VP2 comprising the substitution D160E (AAV9 Capsid VP2 D160E) that has the nucleotide sequence of SEQ ID No: 261 or any other nucleotide sequence encoding the corresponding amino acid sequence of the given modified protein.

[0697] In some embodiments of the invention, the isolated nucleic acid encoding a modified capsid includes a nucleic acid encoding a modified AAV5 capsid protein VP3 comprising the D95E (AAV9 Capsid VP3 D95E) that has the nucleotide sequence of SEQ ID No: 263 or any other nucleotide sequence encoding the corresponding amino acid sequence of the given modified protein.

[0698] In some embodiments of the invention, the isolated nucleic acid encoding a modified capsid includes a nucleic acid encoding a modified AAV9 capsid protein VP1 comprising the substitution S692T (AAV9 Capsid VP1 S692T) that has the nucleotide sequence of SEQ ID No: 265 or any other nucleotide sequence encoding the corresponding amino acid sequence of the given modified protein.

[0699] In some embodiments of the invention, the isolated nucleic acid encoding a modified capsid includes a nucleic acid encoding a modified AAV9 capsid protein VP2 comprising the substitution S555T (AAV9 Capsid VP2 S555T) that has the nucleotide sequence of SEQ ID No: 267 or any other nucleotide sequence encoding the corresponding amino acid sequence of the given modified protein.

[0700] In some embodiments of the invention, the isolated nucleic acid encoding a modified capsid includes a nucleic acid encoding a modified AAV9 capsid protein VP3 comprising the substitution S490T (AAV9 Capsid VP3 S490T) that has the nucleotide sequence of SEQ ID No: 269 or any other nucleotide sequence encoding the corresponding amino acid sequence of the given modified protein.

[0701] In some embodiments of the invention, the isolated nucleic acid encoding a modified capsid includes a nucleic acid encoding a modified AAV9 capsid protein VP1 comprising the substitution D433Y (AAV9 Capsid VP1 D433Y) that has the nucleotide sequence of SEQ ID No: 271 or any other nucleotide sequence encoding the corresponding amino acid sequence of the given modified protein.

[0702] In some embodiments of the invention, the isolated nucleic acid encoding a modified capsid includes a nucleic acid encoding a modified AAV9 capsid protein VP2 comprising the substitution D296Y (AAV9 Capsid VP2 D296Y) that has the nucleotide sequence of SEQ ID No: 273 or any other nucleotide sequence encoding the corresponding amino acid sequence of the given modified protein.

[0703] In some embodiments of the invention, the isolated nucleic acid encoding a modified capsid includes a nucleic acid encoding a modified AAV5 capsid protein VP3 comprising the D231Y (AAV9 Capsid VP3 D231Y) that has the nucleotide sequence of SEQ ID No: 275 or any other nucleotide sequence encoding the corresponding amino acid sequence of the given modified protein.

[0704] In some embodiments of the invention, the isolated nucleic acid encoding a modified capsid includes a nucleic acid encoding a modified AAV9 capsid protein VP1 comprising the substitution T625L (AAV9 Capsid VP1 T625L) that has the nucleotide sequence of SEQ ID No: 277 or any other nucleotide sequence encoding the corresponding amino acid sequence of the given modified protein.

[0705] In some embodiments of the invention, the isolated nucleic acid encoding a modified capsid includes a nucleic acid encoding a modified AAV9 capsid protein VP2 comprising the substitution T488L (AAV9 Capsid VP2 T488L) that has the nucleotide sequence of SEQ ID No: 279 or any other nucleotide sequence encoding the corresponding amino acid sequence of the given modified protein.

[0706] In some embodiments of the invention, the isolated nucleic acid encoding a modified capsid includes a nucleic acid encoding a modified AAV9 capsid protein VP3 comprising the substitution T423L (AAV9 Capsid VP3 T423L) that has the nucleotide sequence of SEQ ID No: 281 or any other nucleotide sequence encoding the corresponding amino acid sequence of the given modified protein.

[0707] In some embodiments of the invention, the isolated nucleic acid encoding a modified capsid includes a nucleic acid encoding a modified AAV9 capsid protein VP1 comprising the substitution T625V (AAV9 Capsid VP1 T625V) that has the nucleotide sequence of SEQ ID No: 283 or any other nucleotide sequence encoding the corresponding amino acid sequence of the given modified protein.

[0708] In some embodiments of the invention, the isolated nucleic acid encoding a modified capsid includes a nucleic acid encoding a modified AAV9 capsid protein VP2 comprising the substitution T488V (AAV9 Capsid VP2 T488V) that has the nucleotide sequence of SEQ ID No: 285 or any other nucleotide sequence encoding the corresponding amino acid sequence of the given modified protein.

[0709] In some embodiments of the invention, the isolated nucleic acid encoding a modified capsid includes a nucleic acid encoding a modified AAV5 capsid protein VP3 comprising the T423V (AAV9 Capsid VP3 T423V) that has the nucleotide sequence of SEQ ID No: 287 or any other nucleotide sequence encoding the corresponding amino acid sequence of the given modified protein.

[0710] In some embodiments of the invention, the isolated nucleic acid encoding a modified capsid includes a nucleic acid encoding a modified AAV9 capsid protein VP1 comprising the substitution N691A (AAV9 Capsid VP1 N691A) that has the nucleotide sequence of SEQ ID No: 289 or any other nucleotide sequence encoding the corresponding amino acid sequence of the given modified protein.

[0711] In some embodiments of the invention, the isolated nucleic acid encoding a modified capsid includes a nucleic acid encoding a modified AAV9 capsid protein VP2 comprising the substitution N554A (AAV9 Capsid VP2 N554A) that has the nucleotide sequence of SEQ ID No: 291 or any other nucleotide sequence encoding the corresponding amino acid sequence of the given modified protein.

[0712] In some embodiments of the invention, the isolated nucleic acid encoding a modified capsid includes a nucleic acid encoding a modified AAV9 capsid protein VP3 comprising the substitution N489A (AAV9 Capsid VP3 N489A) that has the nucleotide sequence of SEQ ID No: 293 or any other nucleotide sequence encoding the corresponding amino acid sequence of the given modified protein.

[0713] In some embodiments of the invention, the isolated nucleic acid encoding a modified capsid includes a nucleic acid encoding a modified AAV9 capsid protein VP1 comprising the substitution C396V (AAV9 Capsid VP1 C396V) that has the nucleotide sequence of SEQ ID No: 295 or any other nucleotide sequence encoding the corresponding amino acid sequence of the given modified protein.

[0714] In some embodiments of the invention, the isolated nucleic acid encoding a modified capsid includes a nucleic acid encoding a modified AAV9 capsid protein VP2 comprising the substitution C259V (AAV9 Capsid VP2 C259V) that has the nucleotide sequence of SEQ ID No: 297 or any other nucleotide sequence encoding the corresponding amino acid sequence of the given modified protein.

[0715] In some embodiments of the invention, the isolated nucleic acid encoding a modified capsid includes a nucleic acid encoding a modified AAV5 capsid protein VP3 comprising the C194V (AAV9 Capsid VP3 C194V) that has the nucleotide sequence of SEQ ID No: 299 or any other nucleotide sequence encoding the corresponding amino acid sequence of the given modified protein.

[0716] In some embodiments of the invention, the isolated nucleic acid encoding a modified capsid includes a nucleic acid encoding a modified AAV9 capsid protein VP1 comprising the substitution Y478F (AAV9 Capsid VP1 Y478F) that has the nucleotide sequence of SEQ ID No: 301 or any other nucleotide sequence encoding the corresponding amino acid sequence of the given modified protein.

[0717] In some embodiments of the invention, the isolated nucleic acid encoding a modified capsid includes a nucleic acid encoding a modified AAV9 capsid protein VP2 comprising the substitution Y341F (AAV9 Capsid VP2 Y341F) that has the nucleotide sequence of SEQ ID No: 303 or any other nucleotide sequence encoding the corresponding amino acid sequence of the given modified protein.

[0718] In some embodiments of the invention, the isolated nucleic acid encoding a modified capsid includes a nucleic acid encoding a modified AAV9 capsid protein VP3 comprising the substitution Y276F (AAV9 Capsid VP3 Y276F) that has the nucleotide sequence of SEQ ID No: 305 or any other nucleotide sequence encoding the corresponding amino acid sequence of the given modified protein.

[0719] In some embodiments of the invention, the isolated nucleic acid encoding a modified capsid includes a nucleic acid encoding a modified AAV9 capsid protein VP1 comprising the substitution R296L (AAV9 Capsid VP1 R296L) that has the nucleotide sequence of SEQ ID No: 307 or any other nucleotide sequence encoding the corresponding amino acid sequence of the given modified protein.

[0720] In some embodiments of the invention, the isolated nucleic acid encoding a modified capsid includes a nucleic acid encoding a modified AAV9 capsid protein VP2 comprising the substitution R159L (AAV9 Capsid VP2 R159L) that has the nucleotide sequence of SEQ ID No: 309 or any other nucleotide sequence encoding the corresponding amino acid sequence of the given modified protein.

[0721] In some embodiments of the invention, the isolated nucleic acid encoding a modified capsid includes a nucleic acid encoding a modified AAV5 capsid protein VP3 comprising the R94L (AAV9 Capsid VP3 R94L) that has the nucleotide sequence of SEQ ID No: 311 or any other nucleotide sequence encoding the corresponding amino acid sequence of the given modified protein.

[0722] In some embodiments of the invention, the isolated nucleic acid encoding a modified capsid includes a nucleic acid encoding a modified AAV9 capsid protein VP1 comprising the substitution T733V (AAV9 Capsid VP1 T733V) that has the nucleotide sequence of SEQ ID No: 313 or any other nucleotide sequence encoding the corresponding amino acid sequence of the given modified protein.

[0723] In some embodiments of the invention, the isolated nucleic acid encoding a modified capsid includes a nucleic acid encoding a modified AAV9 capsid protein VP2 comprising the substitution T596V (AAV9 Capsid VP2 T596V) that has the nucleotide sequence of SEQ ID No: 315 or any other nucleotide sequence encoding the corresponding amino acid sequence of the given modified protein.

[0724] In some embodiments of the invention, the isolated nucleic acid encoding a modified capsid includes a nucleic acid encoding a modified AAV9 capsid protein VP3 comprising the substitution T531V (AAV9 Capsid VP3 T531V) that has the nucleotide sequence of SEQ ID No: 317 or any other nucleotide sequence encoding the corresponding amino acid sequence of the given modified protein.

[0725] In some embodiments of the invention, the isolated nucleic acid encoding a modified capsid includes a nucleic acid encoding a modified AAV9 capsid protein VP1 comprising the substitution A427R (AAV9 Capsid VP1 A427R) that has the nucleotide sequence of SEQ ID No: 319 or any other nucleotide sequence encoding the corresponding amino acid sequence of the given modified protein.

[0726] In some embodiments of the invention, the isolated nucleic acid encoding a modified capsid includes a nucleic acid encoding a modified AAV9 capsid protein VP2 comprising the substitution A290R (AAV9 Capsid VP2 A290R) that has the nucleotide sequence of SEQ ID No: 321 or any other nucleotide sequence encoding the corresponding amino acid sequence of the given modified protein.

[0727] In some embodiments of the invention, the isolated nucleic acid encoding a modified capsid includes a nucleic acid encoding a modified AAV5 capsid protein VP3 comprising the A225R (AAV9 Capsid VP3 A225R) that has the nucleotide sequence of SEQ ID No: 323 or any other nucleotide sequence encoding the corresponding amino acid sequence of the given modified protein.

[0728] In some embodiments of the invention, the isolated nucleic acid encoding a modified capsid includes a nucleic acid encoding a modified AAV9 capsid protein VP1 comprising the substitution M635D (AAV9 Capsid VP1 M635D) that has the nucleotide sequence of SEQ ID No: 325 or any other nucleotide sequence encoding the corresponding amino acid sequence of the given modified protein.

[0729] In some embodiments of the invention, the isolated nucleic acid encoding a modified capsid includes a nucleic acid encoding a modified AAV9 capsid protein VP2 comprising the substitution M498D (AAV9 Capsid VP2 M498D) that has the nucleotide sequence of SEQ ID No: 327 or any other nucleotide sequence encoding the corresponding amino acid sequence of the given modified protein.

[0730] In some embodiments of the invention, the isolated nucleic acid encoding a modified capsid includes a nucleic acid encoding a modified AAV9 capsid protein VP3 comprising the substitution M433D (AAV9 Capsid VP3 M433D) that has the nucleotide sequence of SEQ ID No: 329 or any other nucleotide sequence encoding the corresponding amino acid sequence of the given modified protein.

[0731] In some embodiments of the invention, the isolated nucleic acid encoding a modified capsid includes a nucleic acid encoding a modified AAV9 capsid protein VP1 comprising the substitution L444R (AAV9 Capsid VP1 L444R) that has the nucleotide sequence of SEQ ID No: 331 or any other nucleotide sequence encoding the corresponding amino acid sequence of the given modified protein.

[0732] In some embodiments of the invention, the isolated nucleic acid encoding a modified capsid includes a nucleic acid encoding a modified AAV9 capsid protein VP2 comprising the substitution L307R (AAV9 Capsid VP2 L307R) that has the nucleotide sequence of SEQ ID No: 333 or any other nucleotide sequence encoding the corresponding amino acid sequence of the given modified protein.

[0733] In some embodiments of the invention, the isolated nucleic acid encoding a modified capsid includes a nucleic acid encoding a modified AAV5 capsid protein VP3 comprising the L242R (AAV9 Capsid VP3 L242R) that has the nucleotide sequence of SEQ ID No: 335 or any other nucleotide sequence encoding the corresponding amino acid sequence of the given modified protein.

[0734] In some embodiments of the invention, the isolated nucleic acid encoding a modified capsid includes a nucleic acid encoding a modified AAV9 capsid protein VP1 comprising the substitution G604N (AAV9 Capsid VP1 G604N) that has the nucleotide sequence of SEQ ID No: 337 or any other nucleotide sequence encoding the corresponding amino acid sequence of the given modified protein.

[0735] In some embodiments of the invention, the isolated nucleic acid encoding a modified capsid includes a nucleic acid encoding a modified AAV9 capsid protein VP2 comprising the substitution G467N (AAV9 Capsid VP2 G467N) that has the nucleotide sequence of SEQ ID No: 339 or any other nucleotide sequence encoding the corresponding amino acid sequence of the given modified protein.

[0736] In some embodiments of the invention, the isolated nucleic acid encoding a modified capsid includes a nucleic acid encoding a modified AAV9 capsid protein VP3 comprising the substitution G402N (AAV9 Capsid VP3 G402N) that has the nucleotide sequence of SEQ ID No: 341 or any other nucleotide sequence encoding the corresponding amino acid sequence of the given modified protein.

[0737] In some embodiments of the invention, the isolated nucleic acid encoding a modified capsid includes a nucleic acid encoding a modified AAV9 capsid protein VP1 comprising the substitution G627K (AAV9 Capsid VP1 G627K) that has the nucleotide sequence of SEQ ID No: 343 or any other nucleotide sequence encoding the corresponding amino acid sequence of the given modified protein.

[0738] In some embodiments of the invention, the isolated nucleic acid encoding a modified capsid includes a nucleic acid encoding a modified AAV9 capsid protein VP2 comprising the substitution G490K (AAV9 Capsid VP2 G490K) that has the nucleotide sequence of SEQ ID No: 345 or any other nucleotide sequence encoding the corresponding amino acid sequence of the given modified protein.

[0739] In some embodiments of the invention, the isolated nucleic acid encoding a modified capsid includes a nucleic acid encoding a modified AAV5 capsid protein VP3 comprising the G425K (AAV9 Capsid VP3 G425K) that has the nucleotide sequence of SEQ ID No: 347 or any other nucleotide sequence encoding the corresponding amino acid sequence of the given modified protein.

[0740] In some embodiments of the invention, the isolated nucleic acid encoding a modified capsid includes a nucleic acid encoding a modified AAV9 capsid protein VP1 comprising the substitution W695R (AAV9 Capsid VP1 W695R) that has the nucleotide sequence of SEQ ID No: 349 or any other nucleotide sequence encoding the corresponding amino acid sequence of the given modified protein.

[0741] In some embodiments of the invention, the isolated nucleic acid encoding a modified capsid includes a nucleic acid encoding a modified AAV9 capsid protein VP2 comprising the substitution W558R (AAV9 Capsid VP2 W558R) that has the nucleotide sequence of SEQ ID No: 351 or any other nucleotide sequence encoding the corresponding amino acid sequence of the given modified protein.

[0742] In some embodiments of the invention, the isolated nucleic acid encoding a modified capsid includes a nucleic acid encoding a modified AAV9 capsid protein VP3 comprising the substitution W493R (AAV9 Capsid VP3 W493R) that has the nucleotide sequence of SEQ ID No: 353 or any other nucleotide sequence encoding the corresponding amino acid sequence of the given modified protein.

[0743] In some embodiments of the invention, the isolated nucleic acid encoding a modified capsid includes a nucleic acid encoding a modified AAV9 capsid protein VP1 comprising the substitution Q351A (AAV9 Capsid VP1 Q351A) that has the nucleotide sequence of SEQ ID No: 355 or any other nucleotide sequence encoding the corresponding amino acid sequence of the given modified protein.

[0744] In some embodiments of the invention, the isolated nucleic acid encoding a modified capsid includes a nucleic acid encoding a modified AAV9 capsid protein VP2 comprising the substitution Q214A (AAV9 Capsid VP2 Q214A) that has the nucleotide sequence of SEQ ID No: 357 or any other nucleotide sequence encoding the corresponding amino acid sequence of the given modified protein.

[0745] In some embodiments of the invention, the isolated nucleic acid encoding a modified capsid includes a nucleic acid encoding a modified AAV5 capsid protein VP3 comprising the Q149A (AAV9 Capsid VP3 Q149A) that has the nucleotide sequence of SEQ ID No: 359 or any other nucleotide sequence encoding the corresponding amino acid sequence of the given modified protein.

[0746] In some embodiments of the invention, the isolated nucleic acid encoding a modified capsid includes a nucleic acid encoding a modified AAV9 capsid protein VP1 comprising the substitution Y395F (AAV9 Capsid VP1 Y395F) that has the nucleotide sequence of SEQ ID No: 361 or any other nucleotide sequence encoding the corresponding amino acid sequence of the given modified protein.

[0747] In some embodiments of the invention, the isolated nucleic acid encoding a modified capsid includes a nucleic acid encoding a modified AAV9 capsid protein VP2 comprising the substitution Y258F (AAV9 Capsid VP2 Y258F) that has the nucleotide sequence of SEQ ID No: 363 or any other nucleotide sequence encoding the corresponding amino acid sequence of the given modified protein.

[0748] In some embodiments of the invention, the isolated nucleic acid encoding a modified capsid includes a nucleic acid encoding a modified AAV9 capsid protein VP3 comprising the substitution Y193F (AAV9 Capsid VP3 Y193F) that has the nucleotide sequence of SEQ ID No: 365 or any other nucleotide sequence encoding the corresponding amino acid sequence of the given modified protein.

[0749] In some embodiments of the invention, the isolated nucleic acid encoding a modified capsid includes a nucleic acid encoding a modified AAV9 capsid protein VP1 comprising the substitution R434L (AAV9 Capsid VP1 R434L) that has the nucleotide sequence of SEQ ID No: SEQ ID No: 367 or any other nucleotide sequence encoding the corresponding amino acid sequence of the given modified protein.

[0750] In some embodiments of the invention, the isolated nucleic acid encoding a modified capsid includes a nucleic acid encoding a modified AAV9 capsid protein VP2 comprising the substitution R297L (AAV9 Capsid VP2 R297L) that has the nucleotide sequence of SEQ ID No: 369 or any other nucleotide sequence encoding the corresponding amino acid sequence of the given modified protein.

[0751] In some embodiments of the invention, the isolated nucleic acid encoding a modified capsid includes a nucleic acid encoding a modified AAV5 capsid protein VP3 comprising the (AAV9 Capsid VP3 R232L) that has the nucleotide sequence of SEQ ID No: 371 or any other nucleotide sequence encoding the corresponding amino acid sequence of the given modified protein.

[0752] “Any other nucleotide sequence encoding the corresponding amino acid sequence of the given modified protein” refers to a nucleic sequence that is alternative to said nucleic sequence, as, due to the degeneracy of genetic code, a wide range of various DNA sequences can encode the same amino acid sequence. It is well within the skill of a person trained in the art to create these alternative DNA sequences encoding the same amino acid sequences. Such variant DNA sequences are within the scope of the present invention.

[0753] In some embodiments, the isolated nucleic acid encoding any of the above modified capsids comprises any of the above nucleic acid sequences or combinations thereof.

### Recombinant Adeno-Associated Virus-Based Vector

[0754] In one aspect, the present invention relates to a vector based on recombinant adeno-associated virus for delivering to a subject a heterologous nucleic acid sequence, which includes:
[0755] 1) any of the above modified capsids, and
[0756] 2) a heterologous nucleic acid sequence comprising regulatory sequences that promote the expression of the product encoded by the heterologous nucleic acid sequence, in the target cells.

[0757] The terms “vector based on recombinant adeno-associated virus”, “recombinant virus based on AAV”, “virus-like particle based on AAV”, “recombinant viral AAV strain”, “recombinant AAV vector” or “rAAV vector” as used in the present description have the same meaning.

[0758] In some embodiments of the invention, the rAAV vector includes a heterologous nucleic acid sequence comprising regulatory sequences that provide product expression, wherein the product of expression of the heterologous nucleic acid sequence is a therapeutic polypeptide or reporter polypeptide.

[0759] The rAAV vector according to the invention does not comprise nucleotide sequences of genes encoding sequences of proteins (Rep) that are essential for the virus life cycle, as well as sequences of overlapping capsid proteins (Cap).

[0760] The capsid is characterized in detail in the above section of the description.

[0761] “Regulatory sequences that provide the expression of product encoded by the heterologous nucleic acid sequence in target cells”, as used in the present invention, mean polynucleotide sequences that are necessary to influence the expression and processing of coding sequences to which they are cloned. Expression control sequences include appropriate transcription initiation, termination, promoter and enhancer sequences; efficient RNA processing signals such as splicing and polyadenylation signals; sequences that stabilize cytoplasmic mRNA; sequences that enhance translation efficiency (i.e. Kozak consensus sequence); sequences that enhance protein stability; and when desired, sequences that enhance protein secretion. The nature of such control sequences differs depending upon the host organism; in prokaryotes, such control sequences generally include the promoter of ribosome binding site, and transcription termination sequences; in eukaryotes, typically, such control sequences include promoters and transcription termination sequences. The term “regulatory sequences” includes at least all components, the presence of which is essential for expression and processing, and can also include additional components, the presence of which is advantageous, for example, leader peptide sequences.

[0762] As used in the present description, the term “promoter” refers to a nucleic acid fragment that controls the transcription of one or more coding sequences and is structurally identified by the presence of a binding site for DNA-dependent RNA polymerase, transcription initiation sites and any other DNA sequences, including, but not limited to transcription factor binding sites, repressor and activator protein binding sites, and any other sequences of nucleotides known to one of skill in the art that directly or indirectly regulate the level of transcription with said promoter. A “constitutive” promoter is a promoter that is active in most tissues under typical physiological and developmental conditions. An “inducible” promoter is a promoter that is physiologically or developmentally regulated, e.g. under the influence of a chemical inducer. A “tissue specific” promoter is only active in specific types of tissues or cells.

[0763] Promoters that are used for high-level production of polypeptides in eukaryotic cells and, in particular, in mammalian cells, should be strong and preferably active in a wide range of cell types. Strong constitutive promoters which are capable of driving expression in many cell types are well known in the art and, therefore, it is not herein necessary to describe them in detail. In accordance with the idea of the present invention, it is preferable to use the cytomegalovirus (CMV) promoter. A promoter or promoter/enhancer derived from the immediate early (IE) region of human cytomegalovirus (hCMV) is particularly suitable as a promoter for the rAAV5 vector of the present invention. Human cytomegalovirus (hCMV) immediate early (IE) region and functional expression-inducing and/or functional expression-enhancing fragments derived therefrom, for example, have been disclosed in EP0173177 and EP0323997, and are well known in the art. Thus, several fragments of the hCMV immediate early (IE) region may be used as a promoter and/or promoter/enhancer.

[0764] The terms “enhancers” or “enhancer” as used herein may refer to a DNA sequence that is located adjacent to the DNA sequence that encodes a recombinant product. Enhancer elements are typically located in a 5′ direction from a promoter element or can be located downstream of or within a coding DNA sequence (e.g. a DNA sequence transcribed or translated into a recombinant product or products). Hence, an enhancer element may be located 100 base pairs, 200 base pairs, or 300 or more base pairs upstream of a DNA sequence that encodes a recombinant product, or downstream of said sequence. Enhancer elements may increase the amount of a recombinant product being expressed from a DNA sequence above the level of expression associated with a single promoter element. Multiple enhancer elements are readily available to those of ordinary skill in the art.

[0765] In some embodiments of the invention, the heterologous nucleic acid sequence comprising regulatory sequences providing the expression of a product encoded by the heterologous nucleic acid sequence in target cells may include the following elements in the 5′-end to 3′-end direction:
[0766] a left-hand (first) ITR (inverted terminal repeats);
[0767] A CMV (cytomegalovirus) enhancer;
[0768] A CMV (cytomegalovirus) promoter;
[0769] an intron of the hBG1 gene (hemoglobin subunit gamma 1 gene);
[0770] a nucleic acid encoding the product;
[0771] an hGH1 polyadenylation signal (human growth hormone gene polyadenylation signal);
[0772] a right-hand (second) ITR.

[0773] In some embodiments, the nucleic acid encoding the product (transgene) is at least one gene encoding a protein. In some embodiments, the transgene encodes at least one small inhibitory nucleic acid. In some embodiments, the transgene encodes at least one reporter molecule. In some embodiments, the small inhibitory nucleic acid is miRNA. In some embodiments, the small inhibitory nucleic acid is sponge miRNA or TuD-RNA, which inhibits the activity of at least one miRNA in an animal. In some embodiments, miRNA is expressed in a cell of the target tissue. In some embodiments, the target tissue is the tissue of the liver, central nervous system (CNS), eyes, gastrointestinal tract, respiratory tract, breast, pancreas, urinary tract or uterine tissue.

[0774] In some embodiments, the rAAV vector has a product of expression of the heterologous nucleic acid sequence, which is a therapeutic polypeptide or a reporter polypeptide.

[0775] In some embodiments, the rAAV vector comprises a heterologous nucleic acid sequence encoding a product that is a therapeutic polypeptide, wherein the therapeutic polypeptide is a coagulation factor selected from the group consisting of Factor VIII, Factor IX, or a functional variant thereof.

[0776] In some embodiments, the rAAV vector comprises a heterologous nucleic acid sequence encoding a product that is Factor VIII or a functional variant thereof.

[0777] In some embodiments, the rAAV vector comprises a heterologous nucleic acid sequence encoding a product that is Factor IX or a functional variant thereof.

[0778] In some embodiments, the rAAV vector comprises a heterologous nucleic acid sequence encoding a product that is the SMN1 protein (survival motor neuron protein)

[0779] In some embodiments, the rAAV vector comprises a heterologous nucleic acid sequence encoding a product that is the RBD-S polypeptide (recombinant receptor-binding domain of S glycoprotein) of SARS-cov2 (severe acute respiratory syndrome coronavirus 2).

### EXAMPLES

[0780] The following examples are provided for better understanding of the invention. These examples are for purposes of illustration only and are not to be construed as limiting the scope of the invention in any manner.

[0781] All publications, patents, and patent applications cited in this specification are incorporated herein by reference. Although the foregoing invention has been described in some detail by way of illustration and example for purposes of clarity of understanding, it will be readily apparent to those of ordinary skill in the art in light of the teachings of this invention that certain changes and modifications may be made thereto without departing from the spirit or scope of the appended embodiments.

### Materials and General Methods

### Recombinant DNA Techniques

[0782] Standard methods were used to manipulate DNA as described in Sambrook, J. et al, Molecular cloning: A laboratory manual; Cold Spring Harbor Laboratory Press, Cold Spring Harbor, New York, 2012. The molecular biological reagents were used according to the manufacturer protocols.

### Gene Synthesis

[0783] Desired gene segments were prepared from oligonucleotides made by chemical synthesis. The gene segments of 300-4,000 bp long, which were flanked by singular restriction sites, were assembled by annealing and ligation of oligonucleotides including PCR amplification and subsequently cloned via the specified restriction sites. The DNA sequences of the subcloned gene fragments were confirmed by DNA sequencing.

DNA Sequence Determination DNA sequences were determined by Sanger sequencing.

### DNA and Protein Sequence Analysis and Sequence Data Management

[0784] The Infomax's Vector NTI Advance suite version 8.0 and SnapGene version 5.1.4.1 were used for sequence creation, mapping, analysis, annotation and illustration.

### Statistical Data Analysis

[0785] The results indicate an average value±standard deviation (SD), analysis of variance (ANOVA) was employed to compare the test and control results, and they were determined to be statistically significant.

### Example 1

### Selection of Mutation Variants in AAV5 Capsid Based on Structural Similarity of Capsids of the Family Parvoviridae

[0786] The design of AAV5 capsid mutations is based on a high degree of structural similarity of capsid proteins within the family Parvoviridae, including non-AAV viruses. The selection of a substitution consists of three steps of:
[0787] 1) determining amino acids in AAV5 capsomere protein, which are located in the interaction interface region of adjacent pentameric subunits of the capsid;
[0788] 2) aligning structurally the modified AAV5 capsid to a capsid of one of the non-AAV parvoviruses (hereinafter referred to as “template capsid”);
[0789] 3) comparing pairwisely amino acid residues of the AAV5 capsid and those of the template capsid.

[0790] The structures of the three-dimensional models of AAV5 and the template capsid are pre-prepared; the pre-preparation consists in completing the missing atoms in the structure using the Prepwizard utility from Schrodinger Suite.

[0791] In step 1, the interaction interface refers to a set of capsomere protein polypeptide chain fragments interacting with the amino acids of an adjacent pentameric subunit, wherein the pentameric subunit refers to a capsid structural element having the shape of a regular pentagon and consisting of 5 capsomere proteins located around the central pore (L. M. Drouin and M. Agbandje-McKenna. Adeno-associated virus structural biology as a tool in vector development. Future Virol., vol. 8, no. 12, pp. 1183-1199, 2013.).

[0792] The second step comprises aligning structurally the AAV5 capsid and the template capsid using the Structure Alignment utility from Schrodinger Suite. Following the results of alignment, for each AAV5 amino acid from the interaction interface of adjacent pentameric subunits, the closest thereto amino acid of the template capsid (structural analogue of the initial amino acid) is determined, which is considered a potential substitution. There is no structural analogue of the initial amino acid if in the vicinity of the nearest thereto amino acid of the template capsid there is present another AAV5 amino acid, the distance to which is less than that to the initial amino acid. Here, the distance between amino acids is estimated by that between alpha-carbon atoms.

[0793] After structural analogues have been determined for all amino acids of the interaction interface of adjacent pentameric subunits, the decision to substitute is made in accordance with Examples 2, 3 and 4.

### Example 2. Design of Mutations Based on the Principle of Increasing the Volume of Amino Acid Residue

[0794] After aligning structurally the AAV5 capsid to the template capsid, we get a pairwise structural correspondence between amino acid residues thereof. In one of the cases, the decision to substitute the initial amino acid for the corresponding amino acid of the template capsid is made following the results of comparing the van der Waals volumes of the amino acid side substituents (N. J. Darby, S. S. N. J. Darby, and T. E. Creighton, Protein Structure. IRL Press at Oxford University Press, 1993; Table 1). A mutation is introduced if the following conditions are met:
[0795] 1. Volume of the amino acid side substituent from the template capsid is greater than that of the initial amino acid side substituent
[0796] 2. An amino acid from the template capsid is not cysteine or methionine.

[0797] The exclusion of cysteine and methionine from the amino acids for potential substitution is due to their significant reactivity, in particular oxidizability.

TABLE 1
Van der Waals volume for amino acid side substituents (N.
J. Darby, S. S. N. J. Darby, and T. E. Creighton, Protein
Structure. IRL Press at Oxford University Press, 1993.)

| Three-letter code | One-letter code | Volume, Å³ |
|---|---|---|
| Ala | A | 67 |
| Arg | R | 148 |
| Asp | D | 96 |
| Asn | N | 91 |
| Cys | C | 86 |
| Gln | Q | 114 |
| Glu | E | 109 |
| Gly | G | 48 |
| His | H | 118 |
| Ile | I | 124 |
| Leu | L | 124 |
| Lys | K | 135 |
| Met | M | 124 |
| Phe | F | 135 |
| Pro | P | 90 |
| Ser | S | 73 |
| Thr | T | 93 |
| Trp | W | 163 |
| Tyr | Y | 141 |
| Val | V | 105 |

[0798] Table 2 shows the results of applying the subject method for designing mutations in the AAV5 capsid using three template capsids: HBOV1 (PDBid 5urf), B19 (PDBid 1s58), BPV (PDBid 4qc8). The first column contains amino acids from the interaction interface of adjacent pentameric subunits of the AAV5 capsid, the remaining columns contain amino acids produced after pairwise structural alignment of AAV5 to each one of the capsids: HBOV1, B19 and BPV. An asterisk indicates amino acids suitable for substitution in accordance with the size criterion for the side substituent and the prohibited substitution for cysteine and methionine.

[0799] Interaction interface for a given subunit is intended to refer to all amino acids, at least one atom of which is present at distance lower than 5 Å from any atom of adjacent pentameric subunits.

[0800] For AAV5, the calculation was made based on the capsid structure PDB ID: 6JCT.

[0801] According to the calculation, its interaction interface between adjacent pentameric AAV5 subunits includes the following ranges of AAV5 capsid protein VP1 residues: 220-226, 283-293, 339-342, 385-392, 412-435, 462-466, 590-598, 611-626, 677-685, 721-724.

TABLE 2
Amino acids from the interaction interface of adjacent pentameric
subunits of the AAV5 capsid and structurally corresponding thereto
amino acids of the capsomeres B19, HBoV1 and BPV.

| AAV5 | B19 | HBoV1 | BPV |
|---|---|---|---|
| C220 | E* | G | G |
| D221 | G | G | G |
| S222 | A | T* | S |
| T223 | T | I* | H* |
| W224 | F | F | F |
| M225 | S | S | S |
| G226 | A* | E* | D* |
| S283 | S | S | S |
| P284 | P | P | P |
| R285 | L | N | Q |
| D286 | E* | D | D |
| W287 | F | W | W |
| Q288 | Q | Q | Q |
| R289 | H | H | R |
| L290 | L | L | L |
| I291 | I | V | T |
| N292 | E* | N | N |
| N293 | N | D* | E* |
| Y339 | Y | H | H |
| Q340 | K* | R* | A |
| L341 | Y* | Y* | Y* |
| P342 | P | P | P |
| F385 | F | L | F |
| F386 | Y* | Y* | F |
| C387 | V* | M | L* |
| L388 | L | L | L |
| E389 | E | E | E |
| Y390 | H | N | N |
| F391 | S | S | S |
| P392 | S | D* | D* |
| P412 | P | E* | E* |
| F413 | P | W* | W* |
| H414 | E | I* | V |
| S415 | N* | E* | N* |
| S416 | L* | N* | N* |
| F417 | E | N | E |
| A418 | G | I* | R* |
| P419 | C | T* | A |
| S420 | Q* | F* | Y* |
| Q421 | H* | S | I* |
| N422 | — | M | P |
| L423 | F* | P | P |
| F424 | Y* | Q | G |
| K425 | E | M | L |
| L426 | M | M | M |
| A427 | Y* | Y* | F* |
| N428 | N | N | N |
| P429 | P | P | P |
| L430 | L | L | K* |
| V431 | Y* | V | V |
| D432 | G | R* | P |
| Q433 | S | S | T |
| Y434 | R* | R* | R* |
| L435 | L | R* | R* |
| K462 | Q | S | T |
| N463 | N | N | S |
| W464 | F | W | W |
| F465 | M | M | M |
| P466 | P | S | T* |
| I590 | L | M | M |
| V591 | M | L* | F* |
| P592 | V* | P | P |
| G593 | G | N* | N* |
| S594 | S | Q* | Q* |
| V595 | V | M | V |
| W596 | W | W | W |
| M597 | N | D | D |
| E598 | R* | S | R* |
| I611 | I | V | K* |
| P612 | P | P | P |
| E613 | N | R* | R* |
| T614 | L* | V* | A |
| G615 | D* | N* | D* |
| A616 | D* | R* | K* |
| H617 | S | K* | H |
| F618 | F | T | T |
| H619 | K* | L* | I* |
| P620 | T* | L* | M |
| S621 | F* | D* | D* |
| P622 | A | T* | P |
| A623 | A | Q* | F* |
| M624 | L | D | D |
| G625 | G | G | G |
| G626 | G | S* | S* |
| K677 | P | K | R* |
| E678 | R* | R* | Y* |
| N679 | K* | G | A |
| S680 | A | T* | T* |
| K681 | T | K | K |
| R682 | G | N | N |
| W683 | R | W | W |
| N684 | N | R* | R* |
| P685 | P | P | P |
| T721 | V* | H* | N |
| R722 | H | K | K |
| P723 | P | V* | V* |
| L724 | L | L | L |

An asterisk indicates amino acids whose side substituent is greater than that of the initial amino acid of the AAV5 capsomere. A dash indicates the fact that there is no structurally similar amino acid in the template capsid.

### Example 3. Design of Mutations Based on the Principle of Increasing the Number of Polar Contacts Between Capsomeres

[0802] In accordance with Example 1, after aligning structurally the AAV5 capsid and the template capsid, we get a pairwise structural correspondence between amino acid residues thereof. In one of the cases, the decision to substitute the initial amino acid for the corresponding amino acid of the template capsid is made based on the analysis of the microenvironment for both the initial amino acid and a structural analogue thereof. In particular, a positive decision to substitute is made if in a pair of corresponding amino acids in the template capsid there is disposed an amino acid with a polar side substituent, and in AAV5 there is disposed one with a non-polar substituent, wherein the both amino acids have at least one polar contact to an adjacent pentameric subunit of the capsid. An amino acid is assumed to have a polar contact if at a distance of no more than 5 Å from any atom of the side substituent other than hydrogen there is disposed at least one atom of the polar group of the side substituent of another amino acid of another capsomere (Table 3). By analogy with Example 2, substitutions for cysteine and methionine are also not allowed.

TABLE 3
List of amino acids with polar side substituents and the
atoms of polar groups thereof (name according to the PDB
specification) with the exception of hydrogen atoms.

| | Atoms included in the polar side group |
|---|---|
| Amino acid | (name according to the PDB specification) |
| Arg | NH1, NH2, CZ, NE |
| Asn | CG, OD1, ND2, |
| Asp | CG, OD1, OD2 |
| Cys | SG |
| Gln | CD, OE1, NE2 |
| Glu | CD, OE1, OE2 |
| His | ND1, CD2, CE1, NE2 |
| Lys | NZ |
| Ser | OG |
| Thr | OG1 |
| Tyr | OH |

[0803] Table 4 shows the results of applying the subject method for designing mutations in the AAV5 capsid using three template capsids: HBOV1 (PDBid 5urf), B19 (PDBid 1s58), BPV (4qc8). The first column contains amino acids from the interaction interface of adjacent pentameric subunits of the AAV5 capsid, for which suitable substitutions were found in one of the three capsids: HBOV1, B19 and BPV. The remaining columns contain amino acids produced after pairwise structural alignment of AAV5 to each of the capsids. An asterisk indicates amino acids suitable for substitution in accordance with the increased number criterion for the polar contacts and the prohibited substitution for cysteine and methionine.

TABLE 4
AAV5 capsomere positions that were revealed to have
suitable substitutions and corresponding thereto
amino acids of the capsids: HBoV1, B19 and BPV.

| AAV5 | B19 | HBoV1 | BPV |
|---|---|---|---|
| 431V | Y* | V | V |
| 616A | D* | K | R |
| 683W | R* | W | W |

An asterisk indicates amino acids suitable for substitution in accordance with the increased number criterion for polar contacts between capsomeres.

### Example 4. Design of Mutations Based on the Principle of Decreasing the Number of Polar Contacts Between Capsomeres

[0804] In accordance with Example 1, after aligning structurally the AAV5 capsid and the template capsid, we get a pairwise structural correspondence between amino acid residues thereof. In one of the cases, the decision to substitute the initial amino acid for the corresponding amino acid of the template capsid is made based on the analysis of the microenvironment for both the initial amino acid and a structural analogue thereof. In particular, a positive decision to substitute is made if in a pair of corresponding amino acids in the AAV5 capsid there is present a polar amino acid residue that forms at least a single polar contact with an adjacent pentameric subunit, whereas in the template capsid there is disposed a non-polar amino acid residue. Further, by analogy with Example 2, cysteine or methionine residues are not considered for substitution.

[0805] Table 5 shows the results of applying the subject method for designing mutations in the AAV5 capsid using three template capsids: HBOV1 (PDBid 5urf), B19 (PDBid 1s58), BPV (4qc8). The first column contains amino acids from the interaction interface of adjacent pentameric subunits of the AAV5 capsid, for which suitable substitutions were found in one of the three capsids: HBOV1, B19 and BPV. The remaining columns contain amino acids produced after pairwise structural alignment of AAV5 to each of the template capsids. An asterisk indicates amino acids suitable for substitution in accordance with the increased number criterion for the polar contacts and the prohibited substitution for cysteine and methionine.

TABLE 5
AAV5 capsomere positions that were revealed to have
suitable substitutions and corresponding thereto
amino acids of the capsids: HBoV1, B19 and BPV.

| AAV5 | B19 | HBoV1 | BPV |
|---|---|---|---|
| S222 | A* | S | T |
| R285 | L* | Q | N |
| Q340 | K | A* | R |
| S420 | Q | Y | F* |
| K425 | E | L* | M |
| N679 | K | A* | G |
| S680 | A* | T | T |
| T721 | V* | N | H |

An asterisk indicates amino acids suitable for substitution in accordance with the decreased number criterion for polar contacts between capsomeres.

### Example 5

### Selection of Mutation Variants in AAV9 Capsid Based on Structural Similarity of Capsids of the Family Parvoviridae

[0806] The design of AAV9 capsid mutations is based on a high degree of structural similarity of capsid proteins within the family Parvoviridae, including non-AAV viruses. The selection of a substitution consists of three steps of:
[0807] 1) determining amino acids in AAV9 capsomere protein, which are located in the interaction interface region of adjacent pentameric subunits of the capsid;
[0808] 2) aligning structurally the modified AAV9 capsid to a capsid of one of the non-AAV parvoviruses (hereinafter referred to as “template capsid”);
[0809] 3) comparing pairwisely amino acid residues of the AAV9 capsid and those of the template capsid.

[0810] The structures of the three-dimensional models of AAV9 and the template capsid are pre-prepared; the pre-preparation consists in completing the missing atoms in the structure using the Prepwizard utility from Schrodinger Suite.

[0811] In step 1, the interaction interface refers to a set of capsomere protein polypeptide chain fragments interacting with the amino acids of an adjacent pentameric subunit, wherein the pentameric subunit refers to a capsid structural element having the shape of a regular pentagon and consisting of 5 capsomere proteins located around the central pore (L. M. Drouin and M. Agbandje-McKenna. Adeno-associated virus structural biology as a tool in vector development. Future Virol., vol. 8, no. 12, pp. 1183-1199, 2013.).

[0812] The second step comprises aligning structurally the AAV9 capsid to the template capsid using the Structure Alignment utility from Schrodinger Suite. Following the results of alignment, for each AAV9 amino acid from the interaction interface of adjacent pentameric subunits, the closest thereto amino acid of the template capsid (structural analogue of the initial amino acid) is determined, which is considered a potential substitution. There is no structural analogue of the initial amino acid if in the vicinity of the nearest thereto amino acid of the template capsid there is present another AAV9 amino acid, the distance to which is less than that to the initial amino acid. Here, the distance between amino acids is estimated by that between alpha-carbon atoms.

[0813] After structural analogues have been determined for all amino acids of the interaction interface of adjacent pentameric subunits, the decision to substitute is made in accordance with Examples 6, 7 and 8.

### Example 6. Design of Mutations Based on the Principle of Increasing the Volume of Amino Acid Residue

[0814] After aligning structurally the AAV9 capsid to the template capsid, we get a pairwise structural correspondence between amino acid residues thereof. In one of the cases, the decision to substitute the initial amino acid for the corresponding amino acid of the template capsid is made following the results of comparing the van der Waals volumes of the amino acid side substituents (N. J. Darby, S. S. N. J. Darby, and T. E. Creighton, Protein Structure. IRL Press at Oxford University Press, 1993; Table 1). A mutation is introduced if the following conditions are met:
[0815] 1. Volume of the amino acid side substituent from the template capsid is greater than that of the initial amino acid side substituent
[0816] 2. An amino acid from the template capsid is not cysteine or methionine.

[0817] The exclusion of cysteine and methionine from the amino acids for potential substitution is due to their significant reactivity, in particular oxidizability.

[0818] Table 6 shows the results of applying the subject method for designing mutations in the AAV9 capsid using three template capsids: HBOV1 (PDBid 5urf), B19 (PDBid 1s58), BPV (PDBid 4qc8). The first column contains amino acids from the interaction interface of adjacent pentameric subunits of the AAV9 capsid, the remaining columns contain amino acids produced after pairwise structural alignment of AAV9 to each one of the capsids: HBOV1, B19 and BPV. An asterisk indicates amino acids suitable for substitution in accordance with the size criterion for the side substituent and the prohibited substitution for cysteine and methionine.

[0819] Interaction interface for a given subunit is intended to refer to all amino acids, at least one atom of which is present at distance lower than 5 Å from any atom of adjacent pentameric subunits. For AAV9, the calculation was made based on the structure PDB ID: 3UX1.

[0820] According to the calculation, its interaction interface between adjacent pentameric subunits of AAV9 includes the following ranges of AAV9 capsid protein VP1 residues: 230-236, 294-304, 350-353, 394-401, 421-444, 476-480, 601-609, 622-637, 689-697, 733-736.

TABLE 6
Amino acids from the interaction interface of adjacent pentameric
subunits of the AAV9 capsid and structurally corresponding thereto
amino acids of the capsomeres B19, HBoV1 and BPV.

| AAV9 | B19 | HBoV1 | BPV |
|---|---|---|---|
| C230 | E* | G | G |
| D231 | G | G | G |
| S232 | A | T* | S |
| Q233 | T | I* | H* |
| W234 | F | F | F |
| L235 | S | S | S |
| G236 | A* | E* | D* |
| S294 | S | S | S |
| P295 | P | P | P |
| R296 | L | N | Q |
| D297 | E* | D | D |
| W298 | F | W | W |
| Q299 | Q | Q | Q |
| R300 | H | H | R |
| L301 | L | L | L |
| I302 | I | V | T |
| N303 | E* | N | N |
| N304 | N | D* | E* |
| Y350 | Y | H | H |
| Q351 | K* | R* | A |
| L352 | Y* | Y* | Y* |
| P353 | P | P | P |
| F394 | F | L | F |
| Y395 | Y | Y | F |
| C396 | V* | M | L* |
| L397 | L | L | L |
| E398 | E | E | E |
| Y399 | H | N | N |
| F400 | S | S | S |
| P401 | S | D* | D* |
| P421 | P | E* | E* |
| F422 | P | W* | W* |
| H423 | E | I* | V |
| S424 | N* | E* | N* |
| S425 | L* | N* | N* |
| Y426 | E | N | E |
| A427 | G | I* | R* |
| H428 | C | T | A |
| S429 | Q* | F* | Y* |
| Q430 | H* | S | I* |
| S431 | F* | M | P* |
| L432 | — | P | P |
| D433 | Y* | Q* | G |
| R434 | E | M | L |
| L435 | M | M | M |
| M436 | Y* | Y* | F* |
| N437 | N | N | N |
| P438 | P | P | P |
| L439 | Y* | L | K* |
| I440 | G | V | V |
| D441 | S | R* | P |
| Q442 | R* | S | T |
| Y443 | — | R* | R* |
| L444 | — | R* | R* |
| R476 | Q | S | T |
| N477 | N | N | S |
| Y478 | F | W* | W* |
| I479 | M | M | M |
| P480 | P | S | T* |
| I601 | L | M | M |
| L602 | M | L | F* |
| P603 | V* | P | P |
| G604 | G | N* | N* |
| M605 | S | Q | Q |
| V606 | V | M | V |
| W607 | W | W | W |
| Q608 | N | D | D |
| D609 | R* | S | R* |
| I622 | I | V | K* |
| P623 | P | P | P |
| H624 | N | R* | R* |
| T625 | L* | V* | A |
| D626 | D | N | D |
| G627 | D* | R* | K* |
| N628 | S | K* | H* |
| F629 | F | T | T |
| H630 | K* | L* | I* |
| P631 | T* | L* | M |
| S632 | Q* | D* | D* |
| P633 | A | T* | — |
| L634 | A | Q | P |
| M635 | L | D | D |
| G636 | G | G | G |
| G637 | G | S* | S* |
| K689 | P | K | R* |
| E690 | R* | R* | Y* |
| N691 | K* | G | A |
| S692 | A | T* | T* |
| K693 | T | K | K |
| R694 | G | N | N |
| W695 | R | W | W |
| N696 | N | R* | R* |
| P697 | P | P | P |
| T733 | V* | H* | N |
| R734 | H | K | K |
| N735 | L* | V* | V* |
| L736 | — | L | L |

An asterisk indicates amino acids whose side substituent is greater than that of the initial amino acid of the AAV9 capsomere. A dash indicates the fact that there is no structurally similar amino acid in the template capsid.

### Example 7. Design of Mutations Based on the Principle of Increasing the Number of Polar Contacts Between Capsomeres

[0821] In accordance with Example 5, following the results of aligning structurally the AAV9 capsid to the template capsid, we get a pairwise structural correspondence between amino acid residues thereof. In one of the cases, the decision to substitute the initial amino acid for the corresponding amino acid of the template capsid is made based on the analysis of the microenvironment for both the initial amino acid and a structural analogue thereof. In particular, a positive decision to substitute is made if in a pair of corresponding amino acids in the template capsid there is disposed an amino acid with a polar side substituent, and in AAV9 there is disposed one with a non-polar substituent, wherein the both amino acids have at least one polar contact with an adjacent pentameric subunit of the capsid. An amino acid is assumed to have a polar contact if at a distance of no more than 5 Å from any atom of the side substituent other than hydrogen there is disposed at least one atom of the polar group of the side substituent of another amino acid of another capsomere (Table 3). By analogy with Example 6, substitutions for cysteine and methionine are also not allowed.

[0822] Table 7 shows the results of applying the subject method for designing mutations in the AAV9 capsid using three template capsids: HBOV1 (PDBid 5urf), B19 (PDBid 1s58), BPV (4qc8). The first column contains amino acids from the interaction interface of adjacent pentameric subunits of the AAV9 capsid, for which suitable substitutions were found in one of the three capsids: HBOV1, B19 and BPV. The remaining columns contain amino acids produced after pairwise structural alignment of AAV9 to each of the capsids. An asterisk indicates amino acids suitable for substitution in accordance with the increased number criterion for the polar contacts and the prohibited substitution for cysteine and methionine.

TABLE 7
AAV9 capsomere positions that were revealed to have
suitable substitutions and corresponding thereto
amino acids of the capsids: HBoV1, B19 and BPV.

| AAV9 | B19 | HBoV1 | BPV |
|---|---|---|---|
| A427 | G | R* | I |
| L439 | Y* | K* | L |
| M635 | L | D* | D |
| W695 | R* | W | W |

An asterisk indicates amino acids suitable for substitution in accordance with the increased number criterion for polar contacts between capsomeres.

### Example 8. Design of Mutations Based on the Principle of Decreasing the Number of Polar Contacts Between Capsomeres

[0823] In accordance with Example 5, following the results of aligning structurally the AAV9 capsid to the template capsid, we get a pairwise structural correspondence between amino acid residues thereof. In one of the cases, the decision to substitute the initial amino acid for the corresponding amino acid of the template capsid is made based on the analysis of the microenvironment for both the initial amino acid and a structural analogue thereof. In particular, a positive decision to substitute is made if in a pair of corresponding amino acids in the AAV9 capsid there is present a polar amino acid residue that forms at least a single polar contact with an adjacent pentameric subunit, whereas in the template capsid there is disposed a non-polar amino acid residue. Further, by analogy with Example 6, cysteine or methionine residues are not considered for substitution.

[0824] Table 8 shows the results of applying the subject method for designing mutations in the AAV9 capsid using three template capsids: HBOV1 (PDBid 5urf), B19 (PDBid 1s58), BPV (4qc8). The first column contains amino acids from the interaction interface of adjacent pentameric subunits of the AAV9 capsid, for which suitable substitutions were found in one of the three capsids: HBoV1, B19 and BPV. The remaining columns contain amino acids produced following the results of pairwise structural alignment of AAV9 to each of the template capsids. An asterisk indicates amino acids suitable for substitution in accordance with the increased number criterion for the polar contacts and the prohibited substitution for cysteine and methionine.

TABLE 8
AAV9 capsomere positions that were revealed to have
suitable substitutions and corresponding thereto
amino acids of the capsids: HBoV1, B19 and BPV.

| AAV9 | B19 | HBoV1 | BPV |
|---|---|---|---|
| R296 | L* | Q | N |
| Q351 | K | A* | R |
| Y395 | Y | F* | Y |
| S429 | Q | Y | F* |
| S431 | F* | P | M |
| R434 | E | L* | M |
| T625 | L* | A* | V* |
| N691 | K | A* | G |
| S692 | A* | T | T |
| T733 | V* | N | H |
| N735 | L* | V* | V* |

An asterisk indicates amino acids suitable for substitution in accordance with the decreased number criterion for polar contacts between capsomeres.

### Example 9. Production of Libraries of AAV5 Capsid Variants

[0825] Libraries of AAV5 capsid variants were produced by random mutagenesis of the Cap gene sequence (Davidsson M. et al., 2016). Briefly, the wild-type sequence of the Cap gene serotype 5 (GenBank ID AF085716.1) was assembled de novo, the synthesized wild-type AAV5 capsid gene was thereafter fragmented using uracil-DNA glycosylase, the resulting fragments were assembled to a full-length Cap gene using DNA polymerase not having a proofreading activity (resulting in random mutations in the sequence). The full-length mutant variants were cloned into the carrier plasmid pAAV-linker (FIG. 1) at AscI/EcoRI restriction sites in a common reading frame with green fluorescent protein (GFP), thereby producing a diverse random library of AAV5 capsids, which library was thereafter used to select capsid variants having increased transduction activity.

[0826] Viral particles having increased transducing activity were positively selected in vitro on CHO-K1-S cells. Further, for transduction, we used particles that were purified using ultracentrifugation in a iodixanol gradient. After 48 hours, the cells were harvested and genomic DNA was isolated for subsequent amplification of the viral genome sequences capable of efficient transduction. The resulting sequences were thereafter re-cloned and re-produced for subsequent selection iterations to enrich the library with variants having the highest transduction efficiency. Following 5 rounds of selection, the capsid genes of 30 clones were sequenced to determine the most successful mutations and combinations thereof. The sequencing results showed that the predominant combinations of mutations were S2A, T711S in AAV5 VP1 and capsid variants containing S2A, T711S, S651A in AAV5 VP1, which were about 20% of the clones. Capsid variants comprising the mutation S651A in AAV5 VP1 were also selected. These capsid variants were cloned into vectors for producing viral particles and further used for visualizing and comparing the transduction profiles relative to wild-type AAV5.

### Example 10. Generation Followed by Selection of Recombinant Viral Particles from Resulting Sequence Library

[0827] To produce and subsequently select recombinant viral particles from the resulting sequence library, a series of plasmids was developed as follows: a carrier plasmid, a plasmid comprising the Rep gene sequence, as well as a construct comprising adenoviral genes that are required for the replication of viral particles.

[0828] The carrier plasmid pAAV-linker (FIG. 1), intended for cloning the libraries of random variants of the capsid gene of AAV serotype 5 into one reading frame with the reporter protein, was produced by substituting the sequence of a modified green fluorescent protein in the original construct pAAV-GFP, using the restrictase-ligase method of cloning at HindIII/EcoRI sites, for the sequence T2A-GFP synthesized de novo with the addition of an EcoRI restriction site from the 5′ end and a HindIII restriction site from the 3′ end.

[0829] The plasmid pAAV-Rep comprising the Rep gene sequence (FIG. 2) produced by de novo cloning of the synthesized Rep gene sequence of AAV serotype 2 (GenBank ID AF043303.1), with the addition of a PciI restriction site at the 5′ end and a PsiI restriction site at the 3′ end into the plasmid pGEM-T Easy (Promega, USA) that was also treated with PciI/PsiI restrictases (New England Biolabs, USA).

[0830] The adenoviral genes for producing the recombinant viral particles were sourced from the construct pHelper (FIG. 3) comprising AmpR—a beta-lactamase gene that provides resistance to ampicillin, Ori—a replication origin in bacteria, Adeno E2A—a helper adenovirus gene sequence involved in viral DNA replication, Adeno E4—a helper adenovirus gene sequence involved in viral DNA replication, Adeno VARNA—a helper adenovirus gene sequence responsible for the translation of both early and late viral genes.

### Example 11. Production of Mutant Variants of AAV5 and AAV9 Capsids

[0831] Gene sequences of wild-type AAV serotype 5 capsid (GenBank ID AF085716.1) and those of wild-type AAV serotype 9 capsid (GenBank ID AY530579.1) were synthesized de novo with the inclusion of SwaI site from the 5′ end and NotI site from the 3′ end into each one of the synthesized sequences, respectively; following treatment with SwaI/NotI restriction endonucleases (New England Biolabs, USA), each of the sequences was cloned into the plasmid vector pAAV-Rep (FIG. 2) also pre-treated with SwaI/NotI restrictases (New England Biolabs, USA), resulting in the following plasmids: pAAV-RC5 (FIG. 4) comprising the sequence of wild-type AAV serotype 5 capsid and further comprising the AAV Rep gene sequence, and pAAV-RC9 (FIG. 5) comprising the sequence of wild-type AAV serotype 9 capsid and further comprising the AAV Rep gene sequence.

[0832] Mutations were introduced into the sequence of wild-type AAV capsid using a commercial QuikChange II Site-directed mutagenesis kit (Agilent, USA) according to the manufacturer's instructions. PCR primers were developed using the QuikChange Primer Design software (Agilent, USA) (Table 9, Table 10). Briefly, the procedure based on site-directed mutagenesis was performed using the plasmids pAAV-RC5 or pAAV-RC9 as a template, respectively. To introduce mutations, the first step included a PCR reaction in individual test tubes for each mutant and control sample supplemented with corresponding oligonucleotides. The second step included treatment with restrictase according to the manufacturer's protocol to remove the template plasmid DNA, the competent E. coli XL-1Blue cells were transformed with the resulting mixture. The resulting clones were analyzed using PCR for specific regions in the target plasmid, the selected mutants were subject to sequencing before use.

TABLE 9
Nucleotide sequences of primers used for site-directed
mutagenesis of the gene sequence of AAV capsid serotype 5.

| Substitution | Forward sequence | Reverse sequence |
|---|---|---|
| G226A | cgattccacgtggatggccgacaga | ggtgacgactctgtcggccatccacgtgg |
| | gtcgtcacc | aatcg |
| D286E | ccactggagcccccgagagtggcaa | gttgatgagtctttgccactctcgggggc |
| | agactcatcaac | tccagtgg |
| L341Y | ggacgacgactaccagtacccctac | gccgacgacgtaggggtactggtagtcgt |
| | gtcgtcggc | cgtcc |
| C387V | cgagaggagcagcttcttcgtccta | gctgggaaagtactctaggacgaagaagc |
| | gagtactttcccagc | tgctcctctcg |
| Q421H | cagcttcgctcccagtcacaacctc | ccagcttgaagaggttgtgactgggagcg |
| | ttcaagctgg | aagctg |
| P466T | ctacaaaaactggttcaccgggccc | gttcggcccatgggcccggtgaaccagtt |
| | atgggccgaac | tttgtag |
| S594Q | caggaaatcgtgcccggccaggtgt | gtccctctccatccacacctggccgggca |
| | ggatggagagggac | cgatttcctg |
| T614L | gccaagatcccagagctcggggcgc | gtgaaagtgcgccccgagctctgggatct |
| | actttcac | tggc |
| N679K | gagatggagtgggagctcaagaagg | ggttccacctcttggacttttccttcttg |
| | aaaagtccaagaggtggaacc | agctcccactccatctc |
| P723V | ctatcggaacccgataccttacccg | catgaatgggttaaagcactcgggtaagg |
| | agtgctttaacccattcatg | tatcgggttccgatag |
| V431Y | gctggccaacccgctgtacgaccag | ggtacaagtactggtcgtacagcgggttg |
| | tacttgtacc | gccagc |
| A616D | gatcccagagacgggggaccacttt | gagaggggtgaaagtggtcccccgtctct |
| | cacccctctc | gggatc |
| W683R | gaaaactccaagaggagaaacccag | gtactggatctctgggtttctcctcttgg |
| | agatccagtac | agttttc |
| S222A | gagattggcattgcgatgccacgtg | ctgtcccccatccacgtggcatcgcaatg |
| | gatgggggacag | ccaatctc |
| R285L | cagccactggagccccctggactgg | gatgagtctttgccagtccagggggctcc |
| | caaagactcatc | agtggctg |
| Q340A | cggacgacgactacgccctgcccta | cgacgacgtagggcagggcgtagtcgtcg |
| | cgtcgtcg | tccg |
| S420F | ctccagcttcgctcccttccagaac | gcttgaagaggttctggaagggagcgaag |
| | ctcttcaagc | ctggag |
| S680A | gctcaagaaggaaaacgccaagagg | ctgggttccacctcttggcgttttccttc |
| | tggaacccag | ttgagc |
| T721V | ggaacccgataccttgtgcgacccc | gaatgggttaaaggggtcgcacaaggtat |
| | tttaacccattc | cgggttcc |

[0833] Codons that bear a substitution are highlighted in bold.

[0834] In a similar fashion, mutations were introduced into the leader variant of AAV serotype 5 capsid simultaneously comprising the mutations S2A and T711S, produced by targeted evolution described in Examples 9 and 10.

TABLE 10
Nucleotide sequences of primers used for site-directed
mutagenesis of the gene sequence of AAV capsid serotype 9.

| Substitution | Forward sequence | Reverse sequence |
|---|---|---|
| Q351K | cttcacggactcagactataagctcc | gagcacgtacgggagcttatagtctgagt |
| | cgtacgtgctc | ccgtgaag |
| Q351R | cttcacggactcagactatagactcc | gagcacgtacgggagtctatagtctgagt |
| | cgtacgtgctc | ccgtgaag |
| S232T | gaaattggcattgcgatacccaatgg | ctgtcccccagccattgggtatcgcaatg |
| | ctgggggacag | ccaatttc |
| D297E | ccacttctcaccacgtgagtggcagc | gttgatgagtcgctgccactcacgtggtg |
| | gactcatcaac | agaagtgg |
| S692T | gctgcagaaggaaaacactaagcgct | cgggttccagcgcttagtgttttccttct |
| | ggaacccg | gcagc |
| D433Y | ctcacagccaaagcctgtatcgacta | gtggattcattagtcgatacaggctttgg |
| | atgaatccac | ctgtgag |
| T625L | gccaaaattcctcacctggacggcaa | ggtgaaagttgccgtccaggtgaggaatt |
| | ctttcacc | ttggc |
| T625V | ggccaaaattcctcacgttgacggca | gtgaaagttgccgtcaacgtgaggaattt |
| | actttcac | tggcc |
| N691A | gagctgcagaaggaagccagcaagcg | ggttccagcgcttgctggcttccttctgc |
| | ctggaacc | agctc |
| C396V | gtcgttcgtccttttacgtgctggaa | gacgggaaatattccagcacgtaaaagga |
| | tatttcccgtc | cgaacgac |
| Y478F | ctgtccagggaagaaacttcatacct | gctgggtccaggtatgaagtttcttccct |
| | ggacccagc | ggacag |
| R296L | ctgccacttctcaccacttgactggc | gagtcgctgccagtcaagtggtgagaagt |
| | agcgactc | ggcag |
| T733V | gcaccagatacctggtccgtaatctg | gtacgttacagattacggaccaggtatct |
| | taacgtac | ggtgc |
| A427R | ctttccatagcagctacagacacagc | gtccaggctttggctgtgtctgtagctgc |
| | caaagcctggac | tatggaaag |
| M635D | cacccttctccgctggatggagggtt | cattccaaaccctccatccagcggagaag |
| | tggaatg | ggtg |
| L444R | cactcatcgaccaatacagatactat | ctttgagagatagtatctgtattggtcga |
| | ctctcaaag | tgagtg |
| G604N | ccaaggaatacttccgaatatggttt | gtcctgccaaaccatattcggaagtattc |
| | ggcaggac | cttgg |
| G627K | caaaattcctcacacggacaagaact | gagaagggtgaaagttcttgtccgtgtga |
| | ttcacccttctc | ggaattttg |
| W695R | ggaaaacagcaagcgcagaaacccgg | gtactggatctccgggtttctgcgcttgc |
| | agatccagtac | tgttttcc |
| Q351A | cacggactcagactatgctctcccgt | cgagcacgtacgggagagcatagtctgag |
| | acgtgctcg | tccgtg |
| Y395F | gtgggtcgttcgtcctttttctgcct | ggaaatattccaggcagaaaaaggacgaa |
| | ggaatatttcc | cgacccac |
| R434L | cagccaaagcctggacctgctaatga | gatgagtggattcattagcaggtccaggc |
| | atccactcatc | tttggctg |

[0835] Codons that bear a substitution are highlighted in bold.

### Example 11. Efficiency of Generation of Vectors Based on Modified Adeno-Associated Virus Serotype 5 (rAAV5)

[0836] To produce rAAV particles with the modified serotype 5 capsid, HEK293 producer cells were transfected using polyethylenimine (PEI, linear, MW 25000, Polyscinces, Inc.) simultaneously with 3 plasmids as follows:
[0837] 1) With a plasmid comprising adenovirus nucleotide sequences encoding proteins and RNAs required for assembly of rAAV particles (helper plasmid);
[0838] 2) With a plasmid comprising the natural nucleotide sequence of the Rep gene of adeno-associated virus serotype 2, as well as the sequence of the modified Cap gene, which is selected from the group comprising: the nucleotide sequence of SEQ ID NO: 7, 13, 19, 25, 31, 37, 43, 49, 55, 61, 67, 73, 79, 85, 91, 97, 103, 109, 115, 121, 127, 133, 139, 145, 151, 157, 163, 169, 175, 181, 187, 193, 199, 205, 211, 217, 223, 229, 235 or any other nucleotide sequence encoding the protein VP1 with the amino acid sequences of SEQ ID No: 8, 14, 20, 26, 32, 38, 44, 50, 56, 62, 68, 74, 80, 86, 92, 98, 104, 110, 116, 122, 128, 134, 140, 146, 152, 158, 164, 170, 176, 182, 188, 194, 200, 206, 212, 218, 224, 230 or 236, and the proteins VP2 and VP3 from alternative reading frames of the nucleotide sequence being used, wherein
[0839] VP2 may have any one of the amino acid sequences of SEQ ID No: 10, 16, 22, 28, 34, 40, 46, 52, 58, 64, 70, 76, 82, 88, 94, 100, 106, 112, 118, 124, 130, 136, 142, 148, 154, 160, 166, 172, 178, 184, 190, 196, 202, 208, 214, 220, 226, 232 or 238;
[0840] and VP3 may have any one of the amino acid sequences of SEQ ID No: 12, 18, 24, 30, 36, 42, 48, 54, 60, 66, 72, 78, 84, 90, 96, 102, 108, 114, 120, 126, 132, 138, 144, 150, 156, 162, 168, 174, 180, 186, 192, 198, 204, 210, 216, 222, 228, 234 or 240;
[0841] 3) With a plasmid comprising a heterologous rAAV particle genome encoding the target gene intended for delivery into patient's cells.

[0842] This set of genes provides the assembly of rAAV viral particles and encapsidation of the target genome therein within 72 hours. 72 hours following transfection, the producing cells were subjected to lysis (TAKARA BIO INC, Japan) to release rAAV particles, the resulting vectors were treated with DNAase I (Invitrogen, USA) for 2 hours at 37° C., followed by another 2 hours of treatment with proteinase K (Invitrogen, USA) at 56° C. The titer of the resulting rAAV particles was verified by quantitative PCR (TaqMan, Applied Biosystems, USA) using an oligonucleotide set consisting of a forward primer 5′-ACCACATGAAGCAGCACGAC-3′, a reverse primer 5′-TCAGCTCGATGCGGTTCAC-3′, and a probe 5′-HEX-CATGCCCGAAGGCTACGTCCAG-BHQ1-3′ specific for the GFP sequence.

[0843] The authors of the invention surprisingly found that the presence of one or more mutations selected from the group comprising G226A, D286E, L341Y, C387V, Q421H, P466T, S594Q, T614L, N679K, P723V, V431Y, A616D, W683R, S222A, R285L, Q340A, S420F, S680A, T721V in wild-type rAAV5 capsid protein VP1 or in rAAV5 capsid protein VP1 already comprising the mutations S2A and T711S caused a statistically reliable increase in the efficiency of transgene packaging by the rAAV vectors with the above mutations. For example, quantitative PCR showed a change in copy number of the packaged heterologous rAAV particle genome encoding the target GFP gene (FIG. 6, FIG. 7).

[0844] In the simultaneous presence of the mutations S2A and T711S (AAV5-01Mut-GFP), the number of packaged viral genomes increased by 7.1 times from 2.51E+09 vg/ml to 1.78E+10 vg/ml compared to the control AAV5 with the wild-type capsid protein VP1 (AAV5-NullMut-GFP).

[0845] In the simultaneous presence of the mutations S2A, G226A and T711S (AAV5-02Mut-GFP), the number of packaged viral genomes increased by 5.4 times from 2.51E+09 vg/ml to 1.36E+10 vg/ml compared to the control AAV5 with the wild-type capsid protein VP1 (AAV5-NullMut-GFP).

[0846] In the simultaneous presence of the mutations S2A, D286E and T711S (AAV5-03Mut-GFP), the number of packaged viral genomes increased by 3.5 times from 2.51E+09 vg/ml to 8.79E+09 vg/ml compared to the control AAV5 with the wild-type capsid protein VP1 (AAV5-NullMut-GFP).

[0847] In the simultaneous presence of the mutations S2A, L341Y and T711S (AAV5-04Mut-GFP), the number of packaged viral genomes increased by 5.8 times from 2.51E+09 vg/ml to 1.46E+10 vg/ml compared to the control AAV5 with the wild-type capsid protein VP1 (AAV5-NullMut-GFP).

[0848] In the simultaneous presence of the mutations S2A, C387V and T711S (AAV5-05Mut-GFP), the number of packaged viral genomes increased by 4.8 times from 2.51E+09 vg/ml to 1.21E+10 vg/ml compared to the control AAV5 with the wild-type capsid protein VP1 (AAV5-NullMut-GFP).

[0849] In the simultaneous presence of the mutations S2A, Q421H and T711S (AAV5-06Mut-GFP), the number of packaged viral genomes increased by 2.1 times from 2.51E+09 vg/ml to 5.27E+09 vg/ml compared to the control AAV5 with the wild-type capsid protein VP1 (AAV5-NullMut-GFP).

[0850] In the simultaneous presence of the mutations S2A, P466T and T711S (AAV5-07Mut-GFP), the number of packaged viral genomes increased by 6.2 times from 2.51E+09 vg/ml to 1.56E+10 vg/ml compared to the control AAV5 with the wild-type capsid protein VP1 (AAV5-NullMut-GFP).

[0851] In the simultaneous presence of the mutations S2A, S594Q and T711S (AAV5-08Mut-GFP), the number of packaged viral genomes increased by 5.9 times from 2.51E+09 vg/ml to 1.48E+10 vg/ml compared to the control AAV5 with the wild-type capsid protein VP1 (AAV5-NullMut-GFP).

[0852] In the simultaneous presence of the mutations S2A, T614L and T711S (AAV5-09Mut-GFP), the number of packaged viral genomes increased by 6.8 times from 2.51E+09 vg/ml to 1.71E+10 vg/ml compared to the control AAV5 with the wild-type capsid protein VP1 (AAV5-NullMut-GFP).

[0853] In the simultaneous presence of the mutations S2A, N679K and T711S (AAV5-10Mut-GFP), the number of packaged viral genomes increased by 3.3 times from 2.51E+09 vg/ml to 8.28E+09 vg/ml compared to the control AAV5 with the wild-type capsid protein VP1 (AAV5-NullMut-GFP).

[0854] In the simultaneous presence of the mutations S2A, P723V and T711S (AAV5-11Mut-GFP), the number of packaged viral genomes increased by 5.0 times from 2.51E+09 vg/ml to 1.26E+10 vg/ml compared to the control AAV5 with the wild-type capsid protein VP1 (AAV5-NullMut-GFP).

[0855] In the simultaneous presence of the mutations S2A, V431Y and T711S (AAV5-12Mut-GFP), the number of packaged viral genomes increased by 2.4 times from 2.51E+09 vg/ml to 6.03E+09 vg/ml compared to the control AAV5 with the wild-type capsid protein VP1 (AAV5-NullMut-GFP).

[0856] In the simultaneous presence of the mutations S2A, A616D and T711S (AAV5-13Mut-GFP), the number of packaged viral genomes increased by 3.6 times from 2.51E+09 vg/ml to 9.04E+09 vg/ml compared to the control AAV5 with the wild-type capsid protein VP1 (AAV5-NullMut-GFP).

[0857] In the simultaneous presence of the mutations S2A, W683R and T711S (AAV5-14Mut-GFP), the number of packaged viral genomes increased by 4.6 times from 2.51E+09 vg/ml to 1.15E+10 vg/ml compared to the control AAV5 with the wild-type capsid protein VP1 (AAV5-NullMut-GFP).

[0858] In the simultaneous presence of the mutations S2A, S222A and T711S (AAV5-15Mut-GFP), the number of packaged viral genomes increased by 1.5 times from 2.51E+09 vg/ml to 3.77E+09 vg/ml compared to the control AAV5 with the wild-type capsid protein VP1 (AAV5-NullMut-GFP).

[0859] In the simultaneous presence of the mutations S2A, R285L and T711S (AAV5-16Mut-GFP), the number of packaged viral genomes increased by 2.5 times from 2.51E+09 vg/ml to 6.28E+09 vg/ml compared to the control AAV5 with the wild-type capsid protein VP1 (AAV5-NullMut-GFP).

[0860] In the simultaneous presence of the mutations S2A, Q340A and T711S (AAV5-17Mut-GFP), the number of packaged viral genomes increased by 1.8 times from 2.51E+09 vg/ml to 4.52E+09 vg/ml compared to the control AAV5 with the wild-type capsid protein VP1 (AAV5-NullMut-GFP).

[0861] In the simultaneous presence of the mutations S2A, S420F and T711S (AAV5-18Mut-GFP), the number of packaged viral genomes increased by 4.4 times from 2.51E+09 vg/ml to 1.10E+10 vg/ml compared to the control AAV5 with the wild-type capsid protein VP1 (AAV5-NullMut-GFP).

[0862] In the simultaneous presence of the mutations S2A, S680A and T711S (AAV5-19Mut-GFP), the number of packaged viral genomes increased by 3.0 times from 2.51E+09 vg/ml to 7.53E+09 vg/ml compared to the control AAV5 with the wild-type capsid protein VP1 (AAV5-NullMut-GFP).

[0863] In the simultaneous presence of the mutations S2A, T721V and T711S (AAV5-20Mut-GFP), the number of packaged viral genomes increased by 5.2 times from 2.51E+09 vg/ml to 1.31E+10 vg/ml compared to the control AAV5 with the wild-type capsid protein VP1 (AAV5-NullMut-GFP).

[0864] In the presence of the single mutation G226A (AAV5-21Mut-GFP), the amount of packaged viral genomes increased by 3.9 times from 2.74E+09 vg/ml to 1.07E+10 vg/ml as compared to control AAV5 with wild-type capsid protein VP1 (AAV5-NullMut-GFP).

[0865] In the presence of the single mutation D286E (AAV5-22Mut-GFP), the amount of packaged viral genomes increased by 2.4 times from 2.74E+09 vg/ml to 6.58E+09 vg/ml as compared to control AAV5 with wild-type capsid protein VP1 (AAV5-NullMut-GFP).

[0866] In the presence of the single mutation L341Y (AAV5-23Mut-GFP), the amount of packaged viral genomes increased by 2.7 times from 2.74E+09 vg/ml to 7.40E+09 vg/ml as compared to control AAV5 with wild-type capsid protein VP1 (AAV5-NullMut-GFP).

[0867] In the presence of the single mutation C387V (AAV5-24Mut-GFP), the amount of packaged viral genomes increased by 4.8 times from 2.74E+09 vg/ml to 1.32E+10 vg/ml as compared to control AAV5 with wild-type capsid protein VP1 (AAV5-NullMut-GFP).

[0868] In the presence of the single mutation Q421H (AAV5-25Mut-GFP), the amount of packaged viral genomes increased by 3.2 times from 2.74E+09 vg/ml to 8.77E+09 vg/ml as compared to control AAV5 with wild-type capsid protein VP1 (AAV5-NullMut-GFP).

[0869] In the presence of the single mutation P466T (AAV5-26Mut-GFP), the amount of packaged viral genomes increased by 1.7 times from 2.74E+09 vg/ml to 4.66E+09 vg/ml as compared to control AAV5 with wild-type capsid protein VP1 (AAV5-NullMut-GFP).

[0870] In the presence of the single mutation S594Q (AAV5-27Mut-GFP), the amount of packaged viral genomes increased by 3.1 times from 2.74E+09 vg/ml to 8.50E+09 vg/ml as compared to control AAV5 with wild-type capsid protein VP1 (AAV5-NullMut-GFP).

[0871] In the presence of the single mutation T614L (AAV5-28Mut-GFP), the amount of packaged viral genomes increased by 1.5 times from 2.74E+09 vg/ml to 4.11E+09 vg/ml as compared to control AAV5 with wild-type capsid protein VP1 (AAV5-NullMut-GFP).

[0872] In the presence of the single mutation N679K (AAV5-29Mut-GFP), the amount of packaged viral genomes increased by 2.5 times from 2.74E+09 vg/ml to 6.85E+09 vg/ml as compared to control AAV5 with wild-type capsid protein VP1 (AAV5-NullMut-GFP).

[0873] In the presence of the single mutation P723V (AAV5-30Mut-GFP), the amount of packaged viral genomes increased by 3.2 times from 2.74E+09 vg/ml to 8.77E+09 vg/ml as compared to control AAV5 with wild-type capsid protein VP1 (AAV5-NullMut-GFP).

[0874] In the presence of the single mutation V431Y (AAV5-31Mut-GFP), the amount of packaged viral genomes increased by 2.4 times from 2.74E+09 vg/ml to 6.58E+09 vg/ml as compared to control AAV5 with wild-type capsid protein VP1 (AAV5-NullMut-GFP).

[0875] In the presence of the single mutation A616D (AAV5-32Mut-GFP), the amount of packaged viral genomes increased by 1.6 times from 2.74E+09 vg/ml to 4.39E+09 vg/ml as compared to control AAV5 with wild-type capsid protein VP1 (AAV5-NullMut-GFP).

[0876] In the presence of the single mutation W683R (AAV5-33Mut-GFP), the amount of packaged viral genomes increased by 1.3 times from 2.74E+09 vg/ml to 3.56E+09 vg/ml as compared to control AAV5 with wild-type capsid protein VP1 (AAV5-NullMut-GFP).

[0877] In the presence of the single mutation S222A (AAV5-34Mut-GFP), the amount of packaged viral genomes increased by 1.8 times from 2.74E+09 vg/ml to 4.93E+09 vg/ml as compared to control AAV5 with wild-type capsid protein VP1 (AAV5-NullMut-GFP).

[0878] In the presence of the single mutation R285L (AAV5-35Mut-GFP), the amount of packaged viral genomes increased by 2.1 times from 2.74E+09 vg/ml to 5.76E+09 vg/ml as compared to control AAV5 with wild-type capsid protein VP1 (AAV5-NullMut-GFP).

[0879] In the presence of the single mutation Q340A (AAV5-36Mut-GFP), the amount of packaged viral genomes increased by 1.4 times from 2.74E+09 vg/ml to 3.84E+09 vg/ml as compared to control AAV5 with wild-type capsid protein VP1 (AAV5-NullMut-GFP).

[0880] In the presence of the single mutation S420F (AAV5-37Mut-GFP), the amount of packaged viral genomes increased by 3.5 times from 2.74E+09 vg/ml to 9.59E+09 vg/ml as compared to control AAV5 with wild-type capsid protein VP1 (AAV5-NullMut-GFP).

[0881] In the presence of the single mutation S680A (AAV5-38Mut-GFP), the amount of packaged viral genomes increased by 2.2 times from 2.74E+09 vg/ml to 6.03E+09 vg/ml as compared to control AAV5 with wild-type capsid protein VP1 (AAV5-NullMut-GFP).

[0882] In the presence of the single mutation T721V (AAV5-39Mut-GFP), the amount of packaged viral genomes increased by 5.1 times from 2.74E+09 vg/ml to 1.40E+10 vg/ml as compared to control AAV5 with wild-type capsid protein VP1 (AAV5-NullMut-GFP).

### Example 12. Efficiency of Generation of Vectors Based on Modified Adeno-Associated Virus Serotype 9 (rAAV9)

[0883] To produce rAAV particles with the modified serotype 9 capsid, HEK293 producer cells were transfected using polyethylenimine (PEI, linear, MW 25000, Polyscinces, Inc.) simultaneously with 3 plasmids as follows:
[0884] 1) With a plasmid comprising adenovirus nucleotide sequences encoding proteins and RNAs required for assembly of rAAV particles (helper plasmid);
[0885] 2) With a plasmid comprising the natural nucleotide sequence of the Rep gene of adeno-associated virus serotype 2, as well as the sequence of the modified Cap gene, which is selected from the group comprising: the nucleotide sequence of SEQ ID NO: 241, 247, 253, 259, 265, 271, 277, 283, 289, 295, 301, 307, 313, 319, 325, 331, 337, 343, 349, 355, 361 or 367 or any other nucleotide sequence encoding the protein VP1 with the amino acid sequences of SEQ ID No: 242, 248, 254, 260, 266, 272, 278, 284, 290, 296, 302, 308, 314, 320, 326, 332, 338, 344, 350, 356, 362 or 368 and the proteins VP2 and VP3 from alternative reading frames of the nucleotide sequence being used, wherein
[0886] VP2 may have any one of the amino acid sequences of SEQ ID No: 244, 250, 256, 262, 268, 274, 280, 286, 292, 298, 304, 310, 316, 322, 328, 334, 340, 346, 352, 358, 364 or 370;
[0887] and VP3 may have any one of the amino acid sequences of SEQ ID No: 246, 252, 258, 264, 270, 276, 282, 288, 294, 300, 306, 312, 318, 324, 330, 336, 342, 348, 354, 360, 366 or 372;
[0888] 3) With a plasmid comprising a heterologous rAAV particle genome encoding the target gene intended for delivery into patient's cells.

[0889] This set of genes provides the assembly of rAAV viral particles and encapsidation of the target genome therein within 72 hours. 72 hours following transfection, the producing cells were subjected to lysis (TAKARA BIO INC, Japanese) to release rAAV particles, the resulting vectors were treated with DNAase I (Invitrogen, USA) for 2 hours at 37° C., followed by another 2 hours of treatment with proteinase K (Invitrogen, USA) at 56° C. The titer of the resulting rAAV particles was verified by quantitative PCR (TaqMan, Applied Biosystems, USA) using an oligonucleotide set consisting of a forward primer 5′-ACCACATGAAGCAGCACGAC-3′, a reverse primer 5′-TCAGCTCGATGCGGTTCAC-3′, and a probe 5′-HEX-CATGCCCGAAGGCTACGTCCAG-BHQ1-3′ specific for the GFP sequence.

[0890] The authors of the invention have surprisingly found that the presence of one or more mutations selected from the group comprising S232T, D297E, Q351K, Q351R, C396V, D433Y, L444R, Y478F, G604N, G627K, T625L, T625V, S692T, T733V, A427R, M635D, W695R, R296L, Q351A, Y395F, R434L, N691A in wild-type rAAV9 capsid protein VP1 caused a significant increase in the efficiency of transgene packaging by the rAAV vectors with the above mutations. For example, quantitative PCR showed a change in copy number of the packaged heterologous rAAV particle genome encoding the target GFP gene (FIG. 8).

[0891] In the presence of the mutation S232T (AAV9-01Mut-GFP), the amount of packaged viral genomes increased by 1.9 times from 6.32E+09 vg/ml to 1.19E+10 vg/ml as compared to control AAV9 with wild-type capsid protein VP1 (AAV9-NullMut-GFP).

[0892] In the presence of the mutation D297E (AAV9-02Mut-GFP), the amount of packaged viral genomes increased by 3.2 times from 6.32E+09 vg/ml to 2.03E+10 vg/ml as compared to control AAV9 with wild-type capsid protein VP1 (AAV9-NullMut-GFP).

[0893] In the presence of the mutation Q351K (AAV9-03Mut-GFP), the amount of packaged viral genomes increased by 1.5 times from 6.32E+09 vg/ml to 9.30E+09 vg/ml as compared to control AAV9 with wild-type capsid protein VP1 (AAV9-NullMut-GFP).

[0894] In the presence of the mutation Q351R (AAV9-04Mut-GFP), the amount of packaged viral genomes increased by 2.5 times from 6.32E+09 vg/ml to 1.60E+10 vg/ml as compared to control AAV9 with wild-type capsid protein VP1 (AAV9-NullMut-GFP).

[0895] In the presence of the mutation C396V (AAV9-05Mut-GFP), the amount of packaged viral genomes increased by 1.9 times from 6.32E+09 vg/ml to 1.17E+10 vg/ml as compared to control AAV9 with wild-type capsid protein VP1 (AAV9-NullMut-GFP).

[0896] In the presence of the mutation D433Y (AAV9-06Mut-GFP), the amount of packaged viral genomes increased by 2.9 times from 6.32E+09 vg/ml to 1.85E+10 vg/ml as compared to control AAV9 with wild-type capsid protein VP1 (AAV9-NullMut-GFP).

[0897] In the presence of the mutation L444R (AAV9-07Mut-GFP), the amount of packaged viral genomes increased by 1.9 times from 6.32E+09 vg/ml to 1.23E+10 vg/ml as compared to control AAV9 with wild-type capsid protein VP1 (AAV9-NullMut-GFP).

[0898] In the presence of the mutation Y478F (AAV9-08Mut-GFP), the amount of packaged viral genomes increased by 5.0 times from 6.32E+09 vg/ml to 3.14E+10 vg/ml as compared to control AAV9 with wild-type capsid protein VP1 (AAV9-NullMut-GFP).

[0899] In the presence of the mutation G604N (AAV9-09Mut-GFP), the amount of packaged viral genomes increased by 2.5 times from 6.32E+09 vg/ml to 1.61E+10 vg/ml as compared to control AAV9 with wild-type capsid protein VP1 (AAV9-NullMut-GFP).

[0900] In the presence of the mutation G627K (AAV9-10Mut-GFP), the amount of packaged viral genomes increased by 1.8 times from 6.32E+09 vg/ml to 1.14E+10 vg/ml as compared to control AAV9 with wild-type capsid protein VP1 (AAV9-NullMut-GFP).

[0901] In the presence of the mutation T625L (AAV9-11Mut-GFP), the amount of packaged viral genomes increased by 4.6 times from 6.32E+09 vg/ml to 2.91E+10 vg/ml as compared to control AAV9 with wild-type capsid protein VP1 (AAV9-NullMut-GFP).

[0902] In the presence of the mutation T625V (AAV9-12Mut-GFP), the amount of packaged viral genomes increased by 5.7 times from 6.32E+09 vg/ml to 3.62E+10 vg/ml as compared to control AAV9 with wild-type capsid protein VP1 (AAV9-NullMut-GFP).

[0903] In the presence of the mutation S692T (AAV9-13Mut-GFP), the amount of packaged viral genomes increased by 2, 1 times from 6.32E+09 vg/ml to 1.32E+10 vg/ml as compared to control AAV9 with wild-type capsid protein VP1 (AAV9-NullMut-GFP).

[0904] In the presence of the mutation T733V (AAV9-14Mut-GFP), the amount of packaged viral genomes increased by 3.0 times from 6.32E+09 vg/ml to 1.89E+10 vg/ml as compared to control AAV9 with wild-type capsid protein VP1 (AAV9-NullMut-GFP).

[0905] In the presence of the mutation A427R (AAV9-15Mut-GFP), the amount of packaged viral genomes increased by 1.6 times from 6.32E+09 vg/ml to 9.86E+09 vg/ml as compared to control AAV9 with wild-type capsid protein VP1 (AAV9-NullMut-GFP).

[0906] In the presence of the mutation M635D (AAV9-16Mut-GFP), the amount of packaged viral genomes increased by 1.9 times from 6.32E+09 vg/ml to 1.21E+10 vg/ml as compared to control AAV9 with wild-type capsid protein VP1 (AAV9-NullMut-GFP).

[0907] In the presence of the mutation W695R (AAV9-17Mut-GFP), the amount of packaged viral genomes increased by 1.5 times from 6.32E+09 vg/ml to 9.41E+09 vg/ml as compared to control AAV9 with wild-type capsid protein VP1 (AAV9-NullMut-GFP).

[0908] In the presence of the mutation R296L (AAV9-18Mut-GFP), the amount of packaged viral genomes increased by 3.0 times from 6.32E+09 vg/ml to 1.93E+10 vg/ml as compared to control AAV9 with wild-type capsid protein VP1 (AAV9-NullMut-GFP).

[0909] In the presence of the mutation Q351A (AAV9-19Mut-GFP), the amount of packaged viral genomes increased by 2.0 times from 6.32E+09 vg/ml to 1.29E+10 vg/ml as compared to control AAV9 with wild-type capsid protein VP1 (AAV9-NullMut-GFP).

[0910] In the presence of the mutation Y395F (AAV9-20Mut-GFP), the amount of packaged viral genomes increased by 4.6 times from 6.32E+09 vg/ml to 2.91E+10 vg/ml as compared to control AAV9 with wild-type capsid protein VP1 (AAV9-NullMut-GFP).

[0911] In the presence of the mutation R434L (AAV9-21Mut-GFP), the amount of packaged viral genomes increased by 4.0 times from 6.32E+09 vg/ml to 2.50E+10 vg/ml as compared to control AAV9 with wild-type capsid protein VP1 (AAV9-NullMut-GFP).

[0912] In the presence of the mutation N691A (AAV9-22Mut-GFP), the amount of packaged viral genomes increased by 4.5 times from 6.32E+09 vg/ml to 2.85E+10 vg/ml as compared to control AAV9 with wild-type capsid protein VP1 (AAV9-NullMut-GFP).

### Example 13. Increased Efficiency of Cell Transduction with rAAV5-Based Products Comprising Point Mutations in Wild-Type rAAV5 Capsid Protein VP1 or in rAAV5 Capsid Protein VP1 Already Comprising the Mutations S2A and T711S

### Experimental Design:

[0913] SK-Hep1 cells were plated into the wells of 12-well plates. The cells were plated into a EMEM growth medium supplemented with glutamine, 10% bovine serum. Cell seeding density was 10,000 cell/cm2. During the transduction run, pre-prepared cells were transduced at MOI of 1,250 vg/cell. All samples were run in triplicates. Intact cells were used as a negative control.

[0914] Transduction efficiency was measured by intensity of the GFP reporter protein signal using a Guava EasyCyte flow cytometer and GuavaSoft software.

[0915] The authors of the invention surprisingly found that the presence of one or more mutations selected from the group comprising G226A, D286E, L341Y, C387V, Q421H, P466T, S594Q, T614L, N679K, P723V, V431Y, A616D, W683R, S222A, R285L, Q340A, S420F, S680A, T721V in wild-type rAAV5 capsid protein VP1 or in rAAV5 capsid protein VP1 already comprising the mutations S2A and T711S caused a statistically significant increase in the efficiency of transgene delivery by the rAAV vectors with the above mutations. For example, flow cytometry revealed a change in the amount of GFP positive cells 48 hours following the transduction of the SK-Hep1 line with rAAV-based products with wild-type AAV5 capsid protein VP1 or wild-type AAV5 capsid protein VP1 bearing one or more mutations selected from the group: G226A, D286E, L341Y, C387V, Q421H, P466T, S594Q, T614L, N679K, P723V, V431Y, A616D, W683R, S222A, R285L, Q340A, S420F, S680A, T721V in wild-type rAAV5 capsid protein VP1 or in rAAV5 capsid protein VP1 already comprising the mutations S2A and T711S (FIG. 9, FIG. 10).

[0916] In the simultaneous presence of the mutations S2A and T711S (AAV5-01Mut-GFP), the amount of GFP-expressing cells increased by 2.16 times from 20.11% to 43.44% compared to the control AAV5 with the wild-type capsid protein VP1 (AAV5-NullMut-GFP).

[0917] In the simultaneous presence of the mutations S2A, G226A and T711S (AAV5-02Mut-GFP), the amount of GFP-expressing cells increased by 2.02 times from 20.11% to 40.69% compared to the control AAV5 with the wild-type capsid protein VP1 (AAV5-NullMut-GFP).

[0918] In the simultaneous presence of the mutations S2A, D286E and T711S (AAV5-03Mut-GFP), the amount of GFP-expressing cells increased by 1.90 times from 20.11% to 38.17% compared to the control AAV5 with the wild-type capsid protein VP1 (AAV5-NullMut-GFP).

[0919] In the simultaneous presence of the mutations S2A, L341Y and T711S (AAV5-04Mut-GFP), the amount of GFP-expressing cells increased by 1.75 times from 20.11% to 35.27% compared to the control AAV5 with the wild-type capsid protein VP1 (AAV5-NullMut-GFP).

[0920] In the simultaneous presence of the mutations S2A, C387V and T711S (AAV5-05Mut-GFP), the amount of GFP-expressing cells increased by 2.10 times from 20.11% to 42.22% compared to the control AAV5 with the wild-type capsid protein VP1 (AAV5-NullMut-GFP).

[0921] In the simultaneous presence of the mutations S2A, Q421H and T711S (AAV5-06Mut-GFP), the amount of GFP-expressing cells increased by 1.64 times from 20.11% to 32.97% compared to the control AAV5 with the wild-type capsid protein VP1 (AAV5-NullMut-GFP).

[0922] In the simultaneous presence of the mutations S2A, P466T and T711S (AAV5-07Mut-GFP), the amount of GFP-expressing cells increased by 1.41 times from 20.11% to 28.35% compared to the control AAV5 with the wild-type capsid protein VP1 (AAV5-NullMut-GFP).

[0923] In the simultaneous presence of the mutations S2A, S594Q and T711S (AAV5-08Mut-GFP), the amount of GFP-expressing cells increased by 2.08 times from 20.11% to 41.82% compared to the control AAV5 with the wild-type capsid protein VP1 (AAV5-NullMut-GFP).

[0924] In the simultaneous presence of the mutations S2A, T614L and T711S (AAV5-09Mut-GFP), the amount of GFP-expressing cells increased by 2.36 times from 20.11% to 47.50% compared to the control AAV5 with the wild-type capsid protein VP1 (AAV5-NullMut-GFP).

[0925] In the simultaneous presence of the mutations S2A, N679K and T711S (AAV5-10Mut-GFP), the amount of GFP-expressing cells increased by 1.67 times from 20.11% to 33.55% compared to the control AAV5 with the wild-type capsid protein VP1 (AAV5-NullMut-GFP).

[0926] In the simultaneous presence of the mutations S2A, P723V and T711S (AAV5-11Mut-GFP), the amount of GFP-expressing cells increased by 1.87 times from 20.11% to 37.60% compared to the control AAV5 with the wild-type capsid protein VP1 (AAV5-NullMut-GFP).

[0927] In the simultaneous presence of the mutations S2A, V431Y and T711S (AAV5-12Mut-GFP), the amount of GFP-expressing cells increased by 1.27 times from 20.11% to 25.54% compared to the control AAV5 with the wild-type capsid protein VP1 (AAV5-NullMut-GFP).

[0928] In the simultaneous presence of the mutations S2A, A616D and T711S (AAV5-13Mut-GFP), the amount of GFP-expressing cells increased by 2.12 times from 20.11% to 42.63% compared to the control AAV5 with the wild-type capsid protein VP1 (AAV5-NullMut-GFP).

[0929] In the simultaneous presence of the mutations S2A, W683R and T711S (AAV5-14Mut-GFP), the amount of GFP-expressing cells increased by 1.26 times from 20.11% to 25.33% compared to the control AAV5 with the wild-type capsid protein VP1 (AAV5-NullMut-GFP).

[0930] In the simultaneous presence of the mutations S2A, S222A and T711S (AAV5-15Mut-GFP), the amount of GFP-expressing cells increased by 1.57 times from 20.11% to 31.57% compared to the control AAV5 with the wild-type capsid protein VP1 (AAV5-NullMut-GFP).

[0931] In the simultaneous presence of the mutations S2A, R285L and T711S (AAV5-16Mut-GFP), the amount of GFP-expressing cells increased by 1.38 times from 20.11% to 27.75% compared to the control AAV5 with the wild-type capsid protein VP1 (AAV5-NullMut-GFP).

[0932] In the simultaneous presence of the mutations S2A, Q340A and T711S (AAV5-17Mut-GFP), the amount of GFP-expressing cells increased by 1.45 times from 20.11% to 29.15% compared to the control AAV5 with the wild-type capsid protein VP1 (AAV5-NullMut-GFP).

[0933] In the simultaneous presence of the mutations S2A, S420F and T711S (AAV5-18Mut-GFP), the amount of GFP-expressing cells increased by 1.57 times from 20.11% to 31.57% compared to the control AAV5 with the wild-type capsid protein VP1 (AAV5-NullMut-GFP).

[0934] In the simultaneous presence of the mutations S2A, S680A and T711S (AAV5-19Mut-GFP), the amount of GFP-expressing cells increased by 1.68 times from 20.11% to 33.78% compared to the control AAV5 with the wild-type capsid protein VP1 (AAV5-NullMut-GFP).

[0935] In the simultaneous presence of the mutations S2A, T721V and T711S (AAV5-20Mut-GFP), the amount of GFP-expressing cells increased by 2.01 times from 20.11% to 40.41% compared to the control AAV5 with the wild-type capsid protein VP1 (AAV5-NullMut-GFP).

[0936] In the presence of the single mutation G226A (AAV5-21Mut-GFP), the amount of GFP-expressing cells increased by 1.29 times from 20.11% to 34.10% as compared to control AAV5 with wild-type capsid protein VP1 (AAV5-NullMut-GFP).

[0937] In the presence of the single mutation D286E (AAV5-22Mut-GFP), the amount of GFP-expressing cells increased by 1.27 times from 20.11% to 33.57% as compared to control AAV5 with wild-type capsid protein VP1 (AAV5-NullMut-GFP).

[0938] In the presence of the single mutation L341Y (AAV5-23Mut-GFP), the amount of GFP-expressing cells increased by 1.41 times from 20.11% to 37.08% as compared to control AAV5 with wild-type capsid protein VP1 (AAV5-NullMut-GFP).

[0939] In the presence of the single mutation C387V (AAV5-24Mut-GFP), the amount of GFP-expressing cells increased by 1.85 times from 20.11% to 48.62% as compared to control AAV5 with wild-type capsid protein VP1 (AAV5-NullMut-GFP).

[0940] In the presence of the single mutation Q421H (AAV5-25Mut-GFP), the amount of GFP-expressing cells increased by 1.52 times from 20.11% to 40.05% as compared to control AAV5 with wild-type capsid protein VP1 (AAV5-NullMut-GFP).

[0941] In the presence of the single mutation P466T (AAV5-26Mut-GFP), the amount of GFP-expressing cells increased by 1.33 times from 20.11% to 34.94% as compared to control AAV5 with wild-type capsid protein VP1 (AAV5-NullMut-GFP).

[0942] In the presence of the single mutation S594Q (AAV5-27Mut-GFP), the amount of GFP-expressing cells increased by 1.60 times from 20.11% to 42.26% as compared to control AAV5 with wild-type capsid protein VP1 (AAV5-NullMut-GFP).

[0943] In the presence of the single mutation T614L (AAV5-28Mut-GFP), the amount of GFP-expressing cells increased by 1.26 times from 20.11% to 33.16% as compared to control AAV5 with wild-type capsid protein VP1 (AAV5-NullMut-GFP).

[0944] In the presence of the single mutation N679K (AAV5-29Mut-GFP), the amount of GFP-expressing cells increased by 1.24 times from 20.11% to 32.78% as compared to control AAV5 with wild-type capsid protein VP1 (AAV5-NullMut-GFP).

[0945] In the presence of the single mutation P723V (AAV5-30Mut-GFP), the amount of GFP-expressing cells increased by 1.58 times from 20.11% to 41.67% as compared to control AAV5 with wild-type capsid protein VP1 (AAV5-NullMut-GFP).

[0946] In the presence of the single mutation V431Y (AAV5-31Mut-GFP), the amount of GFP-expressing cells increased by 1.27 times from 20.11% to 33.46% as compared to control AAV5 with wild-type capsid protein VP1 (AAV5-NullMut-GFP).

[0947] In the presence of the single mutation A616D (AAV5-32Mut-GFP), the amount of GFP-expressing cells increased by 1.46 times from 20.11% to 38.47% as compared to control AAV5 with wild-type capsid protein VP1 (AAV5-NullMut-GFP).

[0948] In the presence of the single mutation W683R (AAV5-33Mut-GFP), the amount of GFP-expressing cells increased by 1.52 times from 20.11% to 40.05% as compared to control AAV5 with wild-type capsid protein VP1 (AAV5-NullMut-GFP).

[0949] In the presence of the single mutation S222A (AAV5-34Mut-GFP), the amount of GFP-expressing cells increased by 1.34 times from 20.11% to 35.31% as compared to control AAV5 with wild-type capsid protein VP1 (AAV5-NullMut-GFP).

[0950] In the presence of the single mutation R285L (AAV5-35Mut-GFP), the amount of GFP-expressing cells increased by 1.55 times from 20.11% to 40.84% as compared to control AAV5 with wild-type capsid protein VP1 (AAV5-NullMut-GFP).

[0951] In the presence of the single mutation Q340A (AAV5-36Mut-GFP), the amount of GFP-expressing cells increased by 1.44 times from 20.11% to 37.94% as compared to control AAV5 with wild-type capsid protein VP1 (AAV5-NullMut-GFP).

[0952] In the presence of the single mutation S420F (AAV5-37Mut-GFP), the amount of GFP-expressing cells increased by 1.63 times from 20.11% to 42.95% as compared to control AAV5 with wild-type capsid protein VP1 (AAV5-NullMut-GFP).

[0953] In the presence of the single mutation S680A (AAV5-38Mut-GFP), the amount of GFP-expressing cells increased by 1.71 times from 20.11% to 45.06% as compared to control AAV5 with wild-type capsid protein VP1 (AAV5-NullMut-GFP).

[0954] In the presence of the single mutation T721V (AAV5-39Mut-GFP), the amount of GFP-expressing cells increased by 2.06 times from 20.11% to 54.40% as compared to control AAV5 with wild-type capsid protein VP1 (AAV5-NullMut-GFP).

### Example 14. Increasing the Efficiency of Cell Transduction with rAAV9-Based Products Comprising Point Mutations in Wild-Type rAAV9 Capsid Protein VP1

### Experimental Design:

[0955] HeLa cells were plated into the wells of 12-well plates. The cells were plated into a EMEM growth medium supplemented with glutamine, 10% bovine serum. Cell seeding density was 10,000 cell/cm2. During the transduction run, pre-prepared cells were transduced at MOI of 100,000 vg/cell. All samples were run in triplicates. Intact cells were used as a negative control.

[0956] Transduction efficiency was measured by intensity of the GFP reporter protein signal using a Guava EasyCyte flow cytometer and GuavaSoft software.

[0957] The authors of the invention have surprisingly found that the presence of one or more mutations selected from the group comprising S232T, D297E, Q351K, Q351R, C396V, D433Y, L444R, Y478F, G604N, G627K, T625L, T625V, S692T, T733V, A427R, M635D, W695R, R296L, Q351A, Y395F, R434L, N691A in wild-type rAAV9 capsid protein VP1 caused a significant increase in the efficiency of transgene delivery by the rAAV vectors with the above mutations. For example, flow cytometry revealed a change in the amount of GFP positive cells 48 hours following HeLa line transduction with rAAV-based products with wild-type AAV9 capsid protein VP1 or wild-type AAV9 capsid protein VP1 bearing one or more mutations selected from the group: S232T, D297E, Q351K, Q351R, C396V, D433Y, L444R, Y478F, G604N, G627K, T625L, T625V, S692T, T733V, A427R, M635D, W695R, R296L, Q351A, Y395F, R434L, N691A in wild-type rAAV9 capsid protein VP1 (FIG. 11).

[0958] In the presence of the mutation S232T (AAV9-01Mut-GFP), the amount of GFP-expressing cells increased by 1.21 times from 27.53% to 33.31% as compared to control AAV9 with wild-type capsid protein VP1 (AAV9-NullMut-GFP).

[0959] In the presence of the mutation D297E (AAV9-02Mut-GFP), the amount of GFP-expressing cells increased by 1.25 times from 27.53% to 34.41% as compared to control AAV9 with wild-type capsid protein VP1 (AAV9-NullMut-GFP).

[0960] In the presence of the mutation Q351K (AAV9-03Mut-GFP), the amount of GFP-expressing cells increased by 1.30 times from 27.53% to 35.87% as compared to control AAV9 with wild-type capsid protein VP1 (AAV9-NullMut-GFP).

[0961] In the presence of the mutation Q351R (AAV9-04Mut-GFP), the amount of GFP-expressing cells increased by 1.16 times from 27.53% to 31.93% as compared to control AAV9 with wild-type capsid protein VP1 (AAV9-NullMut-GFP).

[0962] In the presence of the mutation C396V (AAV9-05Mut-GFP), the amount of GFP-expressing cells increased by 1.37 times from 27.53% to 37.74% as compared to control AAV9 with wild-type capsid protein VP1 (AAV9-NullMut-GFP).

[0963] In the presence of the mutation D433Y (AAV9-06Mut-GFP), the amount of GFP-expressing cells increased by 1.10 times from 27.53% to 30.28% as compared to control AAV9 with wild-type capsid protein VP1 (AAV9-NullMut-GFP).

[0964] In the presence of the mutation L444R (AAV9-07Mut-GFP), the amount of GFP-expressing cells increased by 1.40 times from 27.53% to 38.45% as compared to control AAV9 with wild-type capsid protein VP1 (AAV9-NullMut-GFP).

[0965] In the presence of the mutation Y478F (AAV9-08Mut-GFP), the amount of GFP-expressing cells increased by 1.56 times from 27.53% to 42.95% as compared to control AAV9 with wild-type capsid protein VP1 (AAV9-NullMut-GFP).

[0966] In the presence of the mutation G604N (AAV9-09Mut-GFP), the amount of GFP-expressing cells increased by 1.25 times from 27.53% to 34.32% as compared to control AAV9 with wild-type capsid protein VP1 (AAV9-NullMut-GFP).

[0967] In the presence of the mutation G627K (AAV9-10Mut-GFP), the amount of GFP-expressing cells increased by 1.24 times from 27.53% to 34.14% as compared to control AAV9 with wild-type capsid protein VP1 (AAV9-NullMut-GFP).

[0968] In the presence of the mutation T625L (AAV9-11Mut-GFP), the amount of GFP-expressing cells increased by 1.45 times from 27.53% to 39.92% as compared to control AAV9 with wild-type capsid protein VP1 (AAV9-NullMut-GFP).

[0969] In the presence of the mutation T625V (AAV9-12Mut-GFP), the amount of GFP-expressing cells increased by 1.49 times from 27.53% to 41.02% as compared to control AAV9 with wild-type capsid protein VP1 (AAV9-NullMut-GFP).

[0970] In the presence of the mutation S692T (AAV9-13Mut-GFP), the amount of GFP-expressing cells increased by 1.38 times from 27.53% to 37.99% as compared to control AAV9 with wild-type capsid protein VP1 (AAV9-NullMut-GFP).

[0971] In the presence of the mutation T733V (AAV9-14Mut-GFP), the amount of GFP-expressing cells increased by 1.44 times from 27.53% to 39.73% as compared to control AAV9 with wild-type capsid protein VP1 (AAV9-NullMut-GFP).

[0972] In the presence of the mutation A427R (AAV9-15Mut-GFP), the amount of GFP-expressing cells increased by 1.23 times from 27.53% to 33.86% as compared to control AAV9 with wild-type capsid protein VP1 (AAV9-NullMut-GFP).

[0973] In the presence of the mutation M635D (AAV9-16Mut-GFP), the amount of GFP-expressing cells increased by 1.22 times from 27.53% to 33.59% as compared to control AAV9 with wild-type capsid protein VP1 (AAV9-NullMut-GFP).

[0974] In the presence of the mutation W695R (AAV9-17Mut-GFP), the amount of GFP-expressing cells increased by 1.47 times from 27.53% to 40.47% as compared to control AAV9 with wild-type capsid protein VP1 (AAV9-NullMut-GFP).

[0975] In the presence of the mutation R296L (AAV9-18Mut-GFP), the amount of GFP-expressing cells increased by 1.26 times from 27.53% to 34.69% as compared to control AAV9 with wild-type capsid protein VP1 (AAV9-NullMut-GFP).

[0976] In the presence of the mutation Q351A (AAV9-19Mut-GFP), the amount of GFP-expressing cells increased by 1.35 times from 27.53% to 37.17% as compared to control AAV9 with wild-type capsid protein VP1 (AAV9-NullMut-GFP).

[0977] In the presence of the mutation Y395F (AAV9-20Mut-GFP), the amount of GFP-expressing cells increased by 1.48 times from 27.53% to 40.74% as compared to control AAV9 with wild-type capsid protein VP1 (AAV9-NullMut-GFP).

[0978] In the presence of the mutation R434L (AAV9-21Mut-GFP), the amount of GFP-expressing cells increased by 1.67 times from 27.53% to 45.91% as compared to control AAV9 with wild-type capsid protein VP1 (AAV9-NullMut-GFP).

[0979] In the presence of the mutation N691A (AAV9-22Mut-GFP), the amount of GFP-expressing cells increased by 1.72 times from 27.53% to 47.47% as compared to control AAV9 with wild-type capsid protein VP1 (AAV9-NullMut-GFP).

### Example 15. Increasing the Production of Target Protein Encoded by Transgene Following Cell Transduction with rAAV5-Based Products Comprising Single Mutations in Wild-Type rAAV5 Capsid Protein VP1 or in rAAV5 Capsid Protein VP1 Already Comprising the Mutations S2A and T711S

### Experimental Design:

[0980] SK-Hep1 cells were plated into the wells of 12-well plates. The cells were plated into a EMEM growth medium supplemented with glutamine, 10% bovine serum. Cell seeding density was 10,000 cell/cm2. During the transduction run, pre-prepared cells were transduced at MOI of 10,000 vg/cell. All samples were run in triplicates. Intact cells were used as a negative control.

[0981] The amount of FIX protein in the culture liquid 7 days post transduction was assessed using the Human Factor IX ELISA Kit. We used a 1:50 dilution of the samples. The procedure was carried out according to the manufacturer's instructions.

[0982] The inventors surprisingly found that the presence of one or more mutations selected from the group comprising G226A, D286E, L341Y, C387V, Q421H, P466T, S594Q, T614L, N679K, P723V, V431Y, A616D, W683R, S222A, R285L, Q340A, S420F, S680A, T721V in wild-type rAAV5 capsid protein VP1 or in rAAV5 capsid protein VP1 already comprising the mutations S2A and T711S caused significantly increased production of FIX protein following transduction of SK-Hep1 cells with rAAV5 vectors with the above mutations. For example, enzyme-linked immunoassay (EIA) revealed increased amount of FIX protein in the culture medium 7 days following the transduction of the SK-Hep1 cells with rAAV-based products with wild-type AAV5 capsid protein VP1 or wild-type AAV5 capsid protein VP1 bearing one or more mutations selected from the group: G226A, D286E, L341Y, C387V, Q421H, P466T, S594Q, T614L, N679K, P723V, V431Y, A616D, W683R, S222A, R285L, Q340A, S420F, S680A, T721V in wild-type rAAV5 capsid protein VP1 or in rAAV5 capsid protein VP1 already comprising the mutations S2A and T711S (FIG. 12, FIG. 13).

[0983] In the simultaneous presence of the mutations S2A, T711S (AAV5-01Mut-FIX), the amount of protein produced increased by 2.76 times from 628.67 ng/ml to 1736.67 ng/ml compared to the control AAV5 with the wild-type capsid protein VP1 (AAV5-NullMut-FIX).

[0984] In the simultaneous presence of the mutations S2A, G226A and T711S (AAV5-02Mut-FIX), the amount of protein produced increased by 1.85 times from 628.67 ng/ml to 1161.83 ng/ml compared to the control AAV5 with the wild-type capsid protein VP1 (AAV5-NullMut-FIX).

[0985] In the simultaneous presence of the mutations S2A, D286E and T711S (AAV5-03Mut-FIX), the amount of protein produced increased by 1.71 times from 628.67 ng/ml to 1075.02 ng/ml compared to the control AAV5 with the wild-type capsid protein VP1 (AAV5-NullMut-FIX).

[0986] In the simultaneous presence of the mutations S2A, L341Y and T711S (AAV5-04Mut-FIX), the amount of protein produced increased by 1.65 times from 628.67 ng/ml to 1037.30 ng/ml compared to the control AAV5 with the wild-type capsid protein VP1 (AAV5-NullMut-FIX).

[0987] In the simultaneous presence of the mutations S2A, C387V and T711S (AAV5-05Mut-FIX), the amount of protein produced increased by 2.28 times from 628.67 ng/ml to 1433.36 ng/ml compared to the control AAV5 with the wild-type capsid protein VP1 (AAV5-NullMut-FIX).

[0988] In the simultaneous presence of the mutations S2A, Q421H and T711S (AAV5-06Mut-FIX), the amount of protein produced increased by 1.67 times from 628.67 ng/ml to 1049.87 ng/ml compared to the control AAV5 with the wild-type capsid protein VP1 (AAV5-NullMut-FIX).

[0989] In the simultaneous presence of the mutations S2A, P466T and T711S (AAV5-07Mut-FIX), the amount of protein produced increased by 1.21 times from 628.67 ng/ml to 763.33 ng/ml compared to the control AAV5 with the wild-type capsid protein VP1 (AAV5-NullMut-FIX).

[0990] In the simultaneous presence of the mutations S2A, S594Q and T711S (AAV5-08Mut-FIX), the amount of protein produced increased by 1.26 times from 628.67 ng/ml to 792.12 ng/ml compared to the control AAV5 with the wild-type capsid protein VP1 (AAV5-NullMut-FIX).

[0991] In the simultaneous presence of the mutations S2A, T614L and T711S (AAV5-09Mut-FIX), the amount of protein produced increased by 2.17 times from 628.67 ng/ml to 1362.67 ng/ml compared to the control AAV5 with the wild-type capsid protein VP1 (AAV5-NullMut-FIX).

[0992] In the simultaneous presence of the mutations S2A, N679K and T711S (AAV5-10Mut-FIX), the amount of protein produced increased by 1.98 times from 628.67 ng/ml to 1244.76 ng/ml compared to the control AAV5 with the wild-type capsid protein VP1 (AAV5-NullMut-FIX).

[0993] In the simultaneous presence of the mutations S2A, P723V and T711S (AAV5-11Mut-FIX), the amount of protein produced increased by 1.69 times from 628.67 ng/ml to 1062.45 ng/ml compared to the control AAV5 with the wild-type capsid protein VP1 (AAV5-NullMut-FIX).

[0994] In the simultaneous presence of the mutations S2A, V431Y and T711S (AAV5-12Mut-FIX), the amount of protein produced increased by 1.12 times from 628.67 ng/ml to 704.11 ng/ml compared to the control AAV5 with the wild-type capsid protein VP1 (AAV5-NullMut-FIX).

[0995] In the simultaneous presence of the mutations S2A, A616D and T711S (AAV5-13Mut-FIX), the amount of protein produced increased by 2.15 times from 628.67 ng/ml to 1351.63 ng/ml compared to the control AAV5 with the wild-type capsid protein VP1 (AAV5-NullMut-FIX).

[0996] In the simultaneous presence of the mutations S2A, W683R and T711S (AAV5-14Mut-FIX), the amount of protein produced increased by 1.08 times from 628.67 ng/ml to 678.96 ng/ml compared to the control AAV5 with the wild-type capsid protein VP1 (AAV5-NullMut-FIX).

[0997] In the simultaneous presence of the mutations S2A, S222A and T711S (AAV5-15Mut-FIX), the amount of protein produced increased by 1.30 times from 628.67 ng/ml to 817.27 ng/ml compared to the control AAV5 with the wild-type capsid protein VP1 (AAV5-NullMut-FIX).

[0998] In the simultaneous presence of the mutations S2A, R285L and T711S (AAV5-16Mut-FIX), the amount of protein produced increased by 1.16 times from 628.67 ng/ml to 729.25 ng/ml compared to the control AAV5 with the wild-type capsid protein VP1 (AAV5-NullMut-FIX).

[0999] In the simultaneous presence of the mutations S2A, Q340A and T711S (AAV5-17Mut-FIX), the amount of protein produced increased by 1.36 times from 628.67 ng/ml to 854.99 ng/ml compared to the control AAV5 with the wild-type capsid protein VP1 (AAV5-NullMut-FIX).

[1000] In the simultaneous presence of the mutations S2A, S420F and T711S (AAV5-18Mut-FIX), the amount of protein produced increased by 1.19 times from 628.67 ng/ml to 745.00 ng/ml compared to the control AAV5 with the wild-type capsid protein VP1 (AAV5-NullMut-FIX).

[1001] In the simultaneous presence of the mutations S2A, S680A and T711S (AAV5-19Mut-FIX), the amount of protein produced increased by 1.52 times from 628.67 ng/ml to 955.57 ng/ml compared to the control AAV5 with the wild-type capsid protein VP1 (AAV5-NullMut-FIX).

[1002] In the simultaneous presence of the mutations S2A, T721V and T711S (AAV5-20Mut-FIX), the amount of protein produced increased by 1.79 times from 628.67 ng/ml to 1125.00 ng/ml compared to the control AAV5 with the wild-type capsid protein VP1 (AAV5-NullMut-FIX).

[1003] In the presence of the single mutation G226A (AAV5-21Mut-FIX), the amount of protein being produced increased by 1.56 times from 653.19 ng/ml to 1020.59 ng/ml as compared to control AAV5 with wild-type capsid protein VP1 (AAV5-NullMut-FIX).

[1004] In the presence of the single mutation D286E (AAV5-22Mut-FIX), the amount of protein being produced increased by 1.63 times from 653.19 ng/ml to 1063.78 ng/ml as compared to control AAV5 with wild-type capsid protein VP1 (AAV5-NullMut-FIX).

[1005] In the presence of the single mutation L341Y (AAV5-23Mut-FIX), the amount of protein being produced increased by 1.95 times from 653.19 ng/ml to 1271.00 ng/ml as compared to control AAV5 with wild-type capsid protein VP1 (AAV5-NullMut-FIX).

[1006] In the presence of the single mutation C387V (AAV5-24Mut-FIX), the amount of protein being produced increased by 1.81 times from 653.19 ng/ml to 1184.04 ng/ml as compared to control AAV5 with wild-type capsid protein VP1 (AAV5-NullMut-FIX).

[1007] In the presence of the single mutation Q421H (AAV5-25Mut-FIX), the amount of protein being produced increased by 1.92 times from 653.19 ng/ml to 1254.12 ng/ml as compared to control AAV5 with wild-type capsid protein VP1 (AAV5-NullMut-FIX).

[1008] In the presence of the single mutation P466T (AAV5-26Mut-FIX), the amount of protein being produced increased by 1.73 times from 653.19 ng/ml to 1130.02 ng/ml as compared to control AAV5 with wild-type capsid protein VP1 (AAV5-NullMut-FIX).

[1009] In the presence of the single mutation S594Q (AAV5-27Mut-FIX), the amount of protein being produced increased by 1.88 times from 653.19 ng/ml to 1228.00 ng/ml as compared to control AAV5 with wild-type capsid protein VP1 (AAV5-NullMut-FIX).

[1010] In the presence of the single mutation T614L (AAV5-28Mut-FIX), the amount of protein being produced increased by 1.40 times from 653.19 ng/ml to 915.81 ng/ml as compared to control AAV5 with wild-type capsid protein VP1 (AAV5-NullMut-FIX).

[1011] In the presence of the single mutation N679K (AAV5-29Mut-FIX), the amount of protein being produced increased by 1.21 times from 653, 19 ng/ml to 790.36 ng/ml as compared to control AAV5 with wild-type capsid protein VP1 (AAV5-NullMut-FIX).

[1012] In the presence of the single mutation P723V (AAV5-30Mut-FIX), the amount of protein being produced increased by 1.35 times from 653.19 ng/ml to 881.81 ng/ml as compared to control AAV5 with wild-type capsid protein VP1 (AAV5-NullMut-FIX).

[1013] In the presence of the single mutation V431Y (AAV5-31Mut-FIX), the amount of protein being produced increased by 1.34 times from 653, 19 ng/ml to 875.27 ng/ml as compared to control AAV5 with wild-type capsid protein VP1 (AAV5-NullMut-FIX).

[1014] In the presence of the single mutation A616D (AAV5-32Mut-FIX), the amount of protein being produced increased by 1.11 times from 653.19 ng/ml to 727.75 ng/ml as compared to control AAV5 with wild-type capsid protein VP1 (AAV5-NullMut-FIX).

[1015] In the presence of the single mutation W683R (AAV5-33Mut-FIX), the amount of protein being produced increased by 1.57 times from 653.19 ng/ml to 1025.51 ng/ml as compared to control AAV5 with wild-type capsid protein VP1 (AAV5-NullMut-FIX).

[1016] In the presence of the single mutation S222A (AAV5-34Mut-FIX), the amount of protein being produced increased by 1.78 times from 653.19 ng/ml to 1162.68 ng/ml as compared to control AAV5 with wild-type capsid protein VP1 (AAV5-NullMut-FIX).

[1017] In the presence of the single mutation R285L (AAV5-35Mut-FIX), the amount of protein being produced increased by 1.47 times from 653.19 ng/ml to 960, 19 ng/ml as compared to control AAV5 with wild-type capsid protein VP1 (AAV5-NullMut-FIX).

[1018] In the presence of the single mutation Q340A (AAV5-36Mut-FIX), the amount of protein being produced increased by 1.64 times from 653.19 ng/ml to 1071.23 ng/ml as compared to control AAV5 with wild-type capsid protein VP1 (AAV5-NullMut-FIX).

[1019] In the presence of the single mutation S420F (AAV5-37Mut-FIX), the amount of protein being produced increased by 1.24 times from 653, 19 ng/ml to 809.96 ng/ml as compared to control AAV5 with wild-type capsid protein VP1 (AAV5-NullMut-FIX).

[1020] In the presence of the single mutation S680A (AAV5-38Mut-FIX), the amount of protein being produced increased by 1.37 times from 653.19 ng/ml to 894.87 ng/ml as compared to control AAV5 with wild-type capsid protein VP1 (AAV5-NullMut-FIX).

[1021] In the presence of the single mutation T721V (AAV5-39Mut-FIX), the amount of protein being produced increased by 1.96 times from 653.19 ng/ml to 1280.25 ng/ml as compared to control AAV5 with wild-type capsid protein VP1 (AAV5-NullMut-FIX).

### Example 16. Increasing the Production of Target Protein Encoded by Transgene Following Cell Transduction with rAAV9-Based Products Comprising Mutations in Wild-Type rAAV9 Capsid Protein VP1

### Experimental Design:

[1022] The CHO-K1-S cells were plated into the wells of 12-well plates. Seeding was made into the following growth medium: DMEM/F12 supplemented with glutamine, glucose content was 4.5 g/1, 5% bovine serum. Cell seeding density was 10,000 cell/cm2. During the transduction run, pre-prepared cells were transduced at MOI of 200,000 vg/cell. All samples were run in triplicates. Intact cells were used as a negative control.

[1023] The amount of FIX protein in the culture liquid 7 days post transduction was assessed using the Human Factor IX ELISA Kit. We used a 1:25 dilution of the samples. The procedure was carried out according to the manufacturer's instructions.

[1024] The authors of the invention have surprisingly found that the presence of one or more mutations selected from the group: S232T, D297E, Q351K, Q351R, C396V, D433Y, L444R, Y478F, G604N, G627K, T625L, T625V, S692T, T733V, A427R, M635D, W695R, R296L, Q351A, Y395F, R434L, N691A in wild-type rAAV9 capsid protein VP1 caused a significant increase in the production of FIX protein following transduction of CHO-K1-S cells with the rAAV vectors with the above mutations. For example, enzyme-linked immunoassay (EIA) revealed increased amount of FIX protein in the culture medium 7 days following the transduction of CHO-K1-S cells with rAAV products with wild-type AAV9 capsid protein VP1 bearing one or more mutations selected from the group: S232T, D297E, Q351K, Q351R, C396V, D433Y, L444R, Y478F, G604N, G627K, T625L, T625V, S692T, T733V, A427R, M635D, W695R, R296L, Q351A, Y395F, R434L, N691A (FIG. 14).

[1025] In the presence of the mutation S232T (AAV9-01Mut-FIX), the amount of protein produced increased by 1.18 times from 947.5 ng/ml to 1118.05 ng/ml as compared to control AAV9 with wild-type capsid protein VP1 (AAV9-NullMut-FIX).

[1026] In the presence of the mutation D297E (AAV9-02Mut-FIX), the amount of protein produced increased by 1.20 times from 947.5 ng/ml to 1137.00 ng/ml as compared to control AAV9 with wild-type capsid protein VP1 (AAV9-NullMut-FIX).

[1027] In the presence of the mutation Q351K (AAV9-03Mut-FIX), the amount of protein produced increased by 1.26 times from 947.5 ng/ml to 1195.00 ng/ml as compared to control AAV9 with wild-type capsid protein VP1 (AAV9-NullMut-FIX).

[1028] In the presence of the mutation Q351R (AAV9-04Mut-FIX), the amount of protein produced increased by 1.22 times from 947.5 ng/ml to 1157.17 ng/ml as compared to control AAV9 with wild-type capsid protein VP1 (AAV9-NullMut-FIX).

[1029] In the presence of the mutation C396V (AAV9-05Mut-FIX), the amount of protein produced increased by 1.64 times from 947.5 ng/ml to 1554.17 ng/ml as compared to control AAV9 with wild-type capsid protein VP1 (AAV9-NullMut-FIX).

[1030] In the presence of the mutation D433Y (AAV9-06Mut-FIX), the amount of protein produced increased by 1.17 times from 947.5 ng/ml to 1110.50 ng/ml as compared to control AAV9 with wild-type capsid protein VP1 (AAV9-NullMut-FIX).

[1031] In the presence of the mutation L444R (AAV9-07Mut-FIX), the amount of protein produced increased by 1.20 times from 947.5 ng/ml to 1141.50 ng/ml as compared to control AAV9 with wild-type capsid protein VP1 (AAV9-NullMut-FIX).

[1032] In the presence of the mutation Y478F (AAV9-08Mut-FIX), the amount of protein produced increased by 2.01 times from 947.5 ng/ml to 1908.50 ng/ml as compared to control AAV9 with wild-type capsid protein VP1 (AAV9-NullMut-FIX).

[1033] In the presence of the mutation G604N (AAV9-09Mut-FIX), the amount of protein produced increased by 1.26 times from 947.5 ng/ml to 1197.67 ng/ml as compared to control AAV9 with wild-type capsid protein VP1 (AAV9-NullMut-FIX).

[1034] In the presence of the mutation G627K (AAV9-10Mut-FIX), the amount of protein produced increased by 1.23 times from 947.5 ng/ml to 1166.67 ng/ml as compared to control AAV9 with wild-type capsid protein VP1 (AAV9-NullMut-FIX).

[1035] In the presence of the mutation T625L (AAV9-11Mut-FIX), the amount of protein produced increased by 1.77 times from 947.5 ng/ml to 1677.50 ng/ml as compared to control AAV9 with wild-type capsid protein VP1 (AAV9-NullMut-FIX).

[1036] In the presence of the mutation T625V (AAV9-12Mut-FIX), the amount of protein produced increased by 1.83 times from 947.5 ng/ml to 1736.67 ng/ml as compared to control AAV9 with wild-type capsid protein VP1 (AAV9-NullMut-FIX).

[1037] In the presence of the mutation S692T (AAV9-13Mut-FIX), the amount of protein produced increased by 1.55 times from 947.5 ng/ml to 1464.83 ng/ml as compared to control AAV9 with wild-type capsid protein VP1 (AAV9-NullMut-FIX).

[1038] In the presence of the mutation T733V (AAV9-14Mut-FIX), the amount of protein produced increased by 1.55 times from 947.5 ng/ml to 1469.50 ng/ml as compared to control AAV9 with wild-type capsid protein VP1 (AAV9-NullMut-FIX).

[1039] In the presence of the mutation A427R (AAV9-15Mut-FIX), the amount of protein produced increased by 1.65 times from 947.5 ng/ml to 1563.38 ng/ml as compared to control AAV9 with wild-type capsid protein VP1 (AAV9-NullMut-FIX).

[1040] In the presence of the mutation M635D (AAV9-16Mut-FIX), the amount of protein produced increased by 1.70 times from 947.5 ng/ml to 1607.00 ng/ml as compared to control AAV9 with wild-type capsid protein VP1 (AAV9-NullMut-FIX).

[1041] In the presence of the mutation W695R (AAV9-17Mut-FIX), the amount of protein produced increased by 2.32 times from 947.5 ng/ml to 2201.67 ng/ml as compared to control AAV9 with wild-type capsid protein VP1 (AAV9-NullMut-FIX).

[1042] In the presence of the mutation R296L (AAV9-18Mut-FIX), the amount of protein produced increased by 1.23 times from 947.5 ng/ml to 1161.83 ng/ml as compared to control AAV9 with wild-type capsid protein VP1 (AAV9-NullMut-FIX).

[1043] In the presence of the mutation Q351A (AAV9-19Mut-FIX), the amount of protein produced increased by 1.48 times from 947.5 ng/ml to 1402.30 ng/ml as compared to control AAV9 with wild-type capsid protein VP1 (AAV9-NullMut-FIX).

[1044] In the presence of the mutation Y395F (AAV9-20Mut-FIX), the amount of protein produced increased by 1.21 times from 947.5 ng/ml to 1145.00 ng/ml as compared to control AAV9 with wild-type capsid protein VP1 (AAV9-NullMut-FIX).

[1045] In the presence of the mutation R434L (AAV9-21Mut-FIX), the amount of protein produced increased by 1.54 times from 947.5 ng/ml to 1456.83 ng/ml as compared to control AAV9 with wild-type capsid protein VP1 (AAV9-NullMut-FIX).

[1046] In the presence of the mutation N691A (AAV9-22Mut-FIX), the amount of protein produced increased by 2.33 times from 947.5 ng/ml to 2203.33 ng/ml as compared to control AAV9 with wild-type capsid protein VP1 (AAV9-NullMut-FIX).

1. A method for producing a modified AAV capsid, comprising:
a) determining amino acids in a capsomere protein of the modified AAV, which are located in the interaction interface region of adjacent pentameric subunits of the capsid;
b) aligning structurally the modified AAV capsid to a template capsid to determine the pairwise correspondence between each amino acid of the modified AAV from the interaction interface region between adjacent pentameric subunits and the amino acid closest thereto of the template capsid, as a structural analogue of an initial amino acid that is considered a potential substitution,
wherein the template capsid is a structurally similar capsid to the modified AAV capsid, of a virus selected from the family Parvoviridae;
c) comparing, in a pairwise manner, amino acid residues, determined in step b), of the modified AAV capsid and the template capsid to identify structural differences between the modified AAV capsid and the template capsid in the interaction interface region of adjacent pentameric subunits of the capsid;
d) selecting positions of amino acid residues for mutagenesis, wherein the amino acid residues for mutagenesis are located in the interaction interface region of adjacent pentameric subunits of the modified AAV capsid and have a structural difference between the modified AAV capsid and the template capsid in the interaction interface region of adjacent pentameric subunits of the capsid;
e) selecting an amino acid residue for mutagenesis at a position of the positions selected in step d) using one of the following principles steps:
(i) substituting the initial amino acid in the capsomere protein of the modified AAV for an amino acid that has a greater volume, other than cysteine and methionine; or
(ii) substituting the initial amino acid in the capsomere protein of the modified AAV for an amino acid that has an increased or decreased number of polar contacts between the capsomeres, other than cysteine and methionine; and
f) introducing one or more amino acid substitutions selected in steps d)-e) in the interaction interface region of adjacent pentameric subunits of the modified AAV capsid.

2. The method for producing the modified AAV capsid according to claim 1, further comprising checking the modified AAV capsid produced in step f) with one or more amino acid substitutions for the presence of one or more improved properties as compared to AAV capsid free of the substitutions, wherein the one or more improved properties are selected from:
increased efficiency of cell transduction,
increased production of target protein, and
increased efficiency of generation due to highly efficient production (assembly) of encapsidated viral vectors based on recombinant adeno-associated virus (rAAV).

3. The method for producing the modified AAV capsid according to claim 1, further comprising checking the modified AAV capsid produced in step f) for the presence of one or more improved properties as compared to AAV capsid free of the substitutions and selecting modified AAV capsids that have one or more improved properties as compared to AAV capsid free of the substitutions, wherein the one or more improved properties are selected from:
increased efficiency of cell transduction,
increased production of target protein, and
increased efficiency of generation due to highly efficient production (assembly) of encapsidated viral vectors based on recombinant adeno-associated virus (rAAV).

4. The method for producing an AAV capsid according to claim 1, wherein the modified AAV capsid is selected from: human AAV, simian AAV, and avian AAV.

5. The method for producing an AAV capsid according to claim 1, wherein the modified AAV capsid is selected from the following AAV serotypes: AAV1, AAV2, AAV3, AAV4, AAV5, AAV6, AAV7, AAV8, AAV9, AAV10 AAV11, AAV12, AAV13, AAV14, AAV15, and AAV16.

6. The method for producing an AAV capsid according to claim 1, wherein the structurally similar template capsid is selected from the group consisting of: parvovirus B19, human bocavirus 1 (HBoV1), and bovine parvovirus (BVP).

7. A modified AAV capsid for producing viral vectors based on recombinant adeno-associated virus, said modified AAV capsid being produced by a method comprising:
a) determining amino acids in capsomere protein of the modified AAV, which are located in the interaction interface region of adjacent pentameric subunits of the capsid;
b) aligning structurally the modified AAV capsid with a template capsid to determine the pairwise correspondence between each amino acid of the modified AAV from the interaction interface region between adjacent pentameric subunits and the nearest amino acid of the template capsid, as a structural analogue of an original amino acid that is considered a potential substitution,
wherein the template capsid is understood to mean a structurally similar capsid of a virus selected from the family Parvoviridae, which is other than AAV;
c) comparing, in a pairwise manner, amino acid residues, determined in step b), of the AAV capsid and the template capsid to identify structural differences between the modified AAV capsid and the template capsid in the interaction interface region of adjacent pentameric subunits of the capsid;
d) selecting positions of amino acid residues for mutagenesis, wherein the amino acid residues for mutagenesis are located in the interaction interface region of adjacent pentameric subunits of the modified AAV capsid and have a structural difference between the modified AAV capsid and the template capsid in the interaction interface region of adjacent pentameric subunits of the capsid;
e) selecting an amino acid residue for mutagenesis at a position of the positions selected in step d) using one of the following principles steps:
(i) substituting the initial amino acid in the capsomere protein of the modified AAV for an amino acid that has a greater volume, other than cysteine and methionine;
(ii) substituting the initial amino acid in the capsomere protein of the modified AAV for an amino acid that has an increased or decreased number of polar contacts between the capsomeres, other than cysteine and methionine;
f) introducing one or more amino acid substitutions selected in steps d)-e) in the interaction interface region of adjacent pentameric subunits of the modified AAV capsid;
g) checking the modified AAV capsids produced in step f) for the presence of one or more improved properties as compared to AAV capsid free of these modifications and selecting modified AAV capsids that have one or more improved properties as compared to AAV capsid free of these modifications, wherein the one or more improved properties are selected from:
increased efficiency of cell transduction,
increased production of target protein, and
increased efficiency of generation due to highly efficient production (assembly) of encapsidated viral vectors based on recombinant adeno-associated virus (rAAV).

8. The modified AAV capsid according to claim 7, wherein the modified AAV capsid is selected from: human AAV, simian AAV, and avian AAV.

9. The modified AAV capsid according to claim 7, wherein the modified AAV capsid is selected from the following AAV serotypes: AAV1, AAV2, AAV3, AAV4, AAV5, AAV6, AAV7, AAV8, AAV9, AAV10 AAV11, AAV12, AAV13, AAV14, AAV15, and AAV16.

10. A modified AAV capsid for producing viral vectors based on recombinant adeno-associated virus, the modified AAV capsid comprising a modified AAV capsid protein VP1 having an amino acid sequence that is selected from: SEQ ID No: 14, 20, 26, 32, 38, 44, 50, 56, 62, 68, 74, 80, 86, 92, 98, 104, 110, 116, 122, 128, 134, 140, 146, 152, 158, 164, 170, 176, 182, 188, 194, 200, 206, 212, 218, 224, 230, 236, 242, 248, 254, 260, 266, 272, 278, 284, 290, 296, 302, 308, 314, 320, 326, 332, 338, 344, 350, 356, 362, and 368.

11. The modified AAV capsid according to claim 10, comprising:
a) a modified AAV capsid protein VP1 having an amino acid sequence that is selected from: SEQ ID No: 14, 20, 26, 32, 38, 44, 50, 56, 62, 68, 74, 80, 86, 92, 98, 104, 110, 116, 122, 128, 134, 140, 146, 152, 158, 164, 170, 176, 182, 188, 194, 200, 206, 212, 218, 224, 230, 236, 242, 248, 254, 260, 266, 272, 278, 284, 290, 296, 302, 308, 314, 320, 326, 332, 338, 344, 350, 356, 362, and 368;
b) a modified AAV capsid protein VP2 corresponding to protein VP1 thereof, said modified AAV capsid protein VP2 having an amino acid sequence that is selected from: SEQ ID No: 16, 22, 28, 34, 40, 46, 52, 58, 64, 70, 76, 82, 88, 94, 100, 106, 112, 118, 124, 130, 136, 142, 148, 154, 160, 166, 172, 178, 184, 190, 196, 202, 208, 214, 220, 226, 232, 238, 244, 250, 256, 262, 268, 274, 280, 286, 292, 298, 304, 310, 316, 322, 328, 334, 340, 346, 352, 358, 364, and 370; and
c) a modified AAV capsid protein VP3 corresponding to protein VP1 thereof, said modified AAV capsid protein VP3 having an amino acid sequence that is selected: SEQ ID No: 18, 24, 30, 36, 42, 48, 54, 60, 66, 72, 78, 84, 90, 96, 102, 108, 114, 120, 126, 132, 138, 144, 150, 156, 162, 168, 174, 180, 186, 192, 198, 204, 210, 216, 222, 228, 234, 240, 246, 252, 258, 264, 270, 276, 282, 288, 294, 300, 306, 312, 318, 324, 330, 336, 342, 348, 354, 360, 366, and 372.

12. An isolated nucleic acid encoding the modified capsid according to claim 7.

13. A vector based on a recombinant adeno-associated virus (AAV) for delivering to a subject a heterologous nucleic acid sequence, said vector comprising:
1) the modified AAV capsid according to claim 7, and
2) a heterologous nucleic acid sequence comprising regulatory sequences that promote the expression of the product encoded by the heterologous nucleic acid sequence, in the target cells.

14. The vector based on the recombinant AAV according to claim 13, wherein the product of expression of the heterologous nucleic acid sequence is a therapeutic polypeptide or reporter polypeptide.

The application's sequence listing, which the Patent Office published only in electronic form, follows.

SEQUENCE LISTING (378 sequences)

SEQ ID NO: 1 - DNA, 2175 bp, Adeno-associated dependoparvovirus B
  source 1..2175: mol_type = genomic DNA
atgtcttttgttgatcaccctccagattggttggaagaagttggtgaaggtcttcgcgagtttttgggccttgaagcgggcccaccgaaaccaaaacccaatcagcagcatcaagatcaagcccgtggtcttgtgctgcctggttataactatctcggacccggaaacggtctcgatcgaggagagcctgtcaacagggcagacgaggtcgcgcgagagcacgacatctcgtacaacgagcagcttgaggcgggagacaacccctacctcaagtacaaccacgcggacgccgagtttcaggagaagctcgccgacgacacatccttcgggggaaacctcggaaaggcagtctttcaggccaagaaaagggttctcgaaccttttggcctggttgaagagggtgctaagacggcccctaccggaaagcggatagacgaccactttccaaaaagaaagaaggctcggaccgaagaggactccaagccttccacctcgtcagacgccgaagctggacccagcggatcccagcagctgcaaatcccagcccaaccagcctcaagtttgggagctgatacaatgtctgcgggaggtggcggcccattgggcgacaataaccaaggtgccgatggagtgggcaatgcctcgggagattggcattgcgattccacgtggatgggggacagagtcgtcaccaagtccacccgaacctgggtgctgcccagctacaacaaccaccagtaccgagagatcaaaagcggctccgtcgacggaagcaacgccaacgcctactttggatacagcaccccctgggggtactttgactttaaccgcttccacagccactggagcccccgagactggcaaagactcatcaacaactactggggcttcagaccccggtccctcagagtcaaaatcttcaacattcaagtcaaagaggtcacggtgcaggactccaccaccaccatcgccaacaacctcacctccaccgtccaagtgtttacggacgacgactaccagctgccctacgtcgtcggcaacgggaccgagggatgcctgccggccttccctccgcaggtctttacgctgccgcagtacggttacgcgacgctgaaccgcgacaacacagaaaatcccaccgagaggagcagcttcttctgcctagagtactttcccagcaagatgctgagaacgggcaacaactttgagtttacctacaactttgaggaggtgcccttccactccagcttcgctcccagtcagaacctcttcaagctggccaacccgctggtggaccagtacttgtaccgcttcgtgagcacaaataacactggcggagtccagttcaacaagaacctggccgggagatacgccaacacctacaaaaactggttcccggggcccatgggccgaacccagggctggaacctgggctccggggtcaaccgcgccagtgtcagcgccttcgccacgaccaataggatggagctcgagggcgcgagttaccaggtgcccccgcagccgaacggcatgaccaacaacctccagggcagcaacacctatgccctggagaacactatgatcttcaacagccagccggcgaacccgggcaccaccgccacgtacctcgagggcaacatgctcatcaccagcgagagcgagacgcagccggtgaaccgcgtggcgtacaacgtcggcgggcagatggccaccaacaaccagagctccaccactgcccccgcgaccggcacgtacaacctccaggaaatcgtgcccggcagcgtgtggatggagagggacgtgtacctccaaggacccatctgggccaagatcccagagacgggggcgcactttcacccctctccggccatgggcggattcggactcaaacacccaccgcccatgatgctcatcaagaacacgcctgtgcccggaaatatcaccagcttctcggacgtgcccgtcagcagcttcatcacccagtacagcaccgggcaggtcaccgtggagatggagtgggagctcaagaaggaaaactccaagaggtggaacccagagatccagtacacaaacaactacaacgacccccagtttgtggactttgccccggacagcaccggggaatacagaaccaccagacctatcggaacccgataccttacccgacccctttaa

SEQ ID NO: 2 - protein, 724 aa, Adeno-associated dependoparvovirus B
MSFVDHPPDWLEEVGEGLREFLGLEAGPPKPKPNQQHQDQARGLVLPGYNYLGPGNGLDRGEPVNRADEVAREHDISYNEQLEAGDNPYLKYNHADAEFQEKLADDTSFGGNLGKAVFQAKKRVLEPFGLVEEGAKTAPTGKRIDDHFPKRKKARTEEDSKPSTSSDAEAGPSGSQQLQIPAQPASSLGADTMSAGGGGPLGDNNQGADGVGNASGDWHCDSTWMGDRVVTKSTRTWVLPSYNNHQYREIKSGSVDGSNANAYFGYSTPWGYFDFNRFHSHWSPRDWQRLINNYWGFRPRSLRVKIFNIQVKEVTVQDSTTTIANNLTSTVQVFTDDDYQLPYVVGNGTEGCLPAFPPQVFTLPQYGYATLNRDNTENPTERSSFFCLEYFPSKMLRTGNNFEFTYNFEEVPFHSSFAPSQNLFKLANPLVDQYLYRFVSTNNTGGVQFNKNLAGRYANTYKNWFPGPMGRTQGWNLGSGVNRASVSAFATTNRMELEGASYQVPPQPNGMTNNLQGSNTYALENTMIFNSQPANPGTTATYLEGNMLITSESETQPVNRVAYNVGGQMATNNQSSTTAPATGTYNLQEIVPGSVWMERDVYLQGPIWAKIPETGAHFHPSPAMGGFGLKHPPPMMLIKNTPVPGNITSFSDVPVSSFITQYSTGQVTVEMEWELKKENSKRWNPEIQYTNNYNDPQFVDFAPDSTGEYRTTRPIGTRYLTRPL

SEQ ID NO: 3 - DNA, 1767 bp, Adeno-associated dependoparvovirus B
  source 1..1767: mol_type = genomic DNA
acggcccctaccggaaagcggatagacgaccactttccaaaaagaaagaaggctcggaccgaagaggactccaagccttccacctcgtcagacgccgaagctggacccagcggatcccagcagctgcaaatcccagcccaaccagcctcaagtttgggagctgatacaatgtctgcgggaggtggcggcccattgggcgacaataaccaaggtgccgatggagtgggcaatgcctcgggagattggcattgcgattccacgtggatgggggacagagtcgtcaccaagtccacccgaacctgggtgctgcccagctacaacaaccaccagtaccgagagatcaaaagcggctccgtcgacggaagcaacgccaacgcctactttggatacagcaccccctgggggtactttgactttaaccgcttccacagccactggagcccccgagactggcaaagactcatcaacaactactggggcttcagaccccggtccctcagagtcaaaatcttcaacattcaagtcaaagaggtcacggtgcaggactccaccaccaccatcgccaacaacctcacctccaccgtccaagtgtttacggacgacgactaccagctgccctacgtcgtcggcaacgggaccgagggatgcctgccggccttccctccgcaggtctttacgctgccgcagtacggttacgcgacgctgaaccgcgacaacacagaaaatcccaccgagaggagcagcttcttctgcctagagtactttcccagcaagatgctgagaacgggcaacaactttgagtttacctacaactttgaggaggtgcccttccactccagcttcgctcccagtcagaacctcttcaagctggccaacccgctggtggaccagtacttgtaccgcttcgtgagcacaaataacactggcggagtccagttcaacaagaacctggccgggagatacgccaacacctacaaaaactggttcccggggcccatgggccgaacccagggctggaacctgggctccggggtcaaccgcgccagtgtcagcgccttcgccacgaccaataggatggagctcgagggcgcgagttaccaggtgcccccgcagccgaacggcatgaccaacaacctccagggcagcaacacctatgccctggagaacactatgatcttcaacagccagccggcgaacccgggcaccaccgccacgtacctcgagggcaacatgctcatcaccagcgagagcgagacgcagccggtgaaccgcgtggcgtacaacgtcggcgggcagatggccaccaacaaccagagctccaccactgcccccgcgaccggcacgtacaacctccaggaaatcgtgcccggcagcgtgtggatggagagggacgtgtacctccaaggacccatctgggccaagatcccagagacgggggcgcactttcacccctctccggccatgggcggattcggactcaaacacccaccgcccatgatgctcatcaagaacacgcctgtgcccggaaatatcaccagcttctcggacgtgcccgtcagcagcttcatcacccagtacagcaccgggcaggtcaccgtggagatggagtgggagctcaagaaggaaaactccaagaggtggaacccagagatccagtacacaaacaactacaacgacccccagtttgtggactttgccccggacagcaccggggaatacagaaccaccagacctatcggaacccgataccttacccgacccctttaa

SEQ ID NO: 4 - protein, 588 aa, Adeno-associated dependoparvovirus B
TAPTGKRIDDHFPKRKKARTEEDSKPSTSSDAEAGPSGSQQLQIPAQPASSLGADTMSAGGGGPLGDNNQGADGVGNASGDWHCDSTWMGDRVVTKSTRTWVLPSYNNHQYREIKSGSVDGSNANAYFGYSTPWGYFDFNRFHSHWSPRDWQRLINNYWGFRPRSLRVKIFNIQVKEVTVQDSTTTIANNLTSTVQVFTDDDYQLPYVVGNGTEGCLPAFPPQVFTLPQYGYATLNRDNTENPTERSSFFCLEYFPSKMLRTGNNFEFTYNFEEVPFHSSFAPSQNLFKLANPLVDQYLYRFVSTNNTGGVQFNKNLAGRYANTYKNWFPGPMGRTQGWNLGSGVNRASVSAFATTNRMELEGASYQVPPQPNGMTNNLQGSNTYALENTMIFNSQPANPGTTATYLEGNMLITSESETQPVNRVAYNVGGQMATNNQSSTTAPATGTYNLQEIVPGSVWMERDVYLQGPIWAKIPETGAHFHPSPAMGGFGLKHPPPMMLIKNTPVPGNITSFSDVPVSSFITQYSTGQVTVEMEWELKKENSKRWNPEIQYTNNYNDPQFVDFAPDSTGEYRTTRPIGTRYLTRPL

SEQ ID NO: 5 - DNA, 1599 bp, Adeno-associated dependoparvovirus B
  source 1..1599: mol_type = genomic DNA
atgtctgcgggaggtggcggcccattgggcgacaataaccaaggtgccgatggagtgggcaatgcctcgggagattggcattgcgattccacgtggatgggggacagagtcgtcaccaagtccacccgaacctgggtgctgcccagctacaacaaccaccagtaccgagagatcaaaagcggctccgtcgacggaagcaacgccaacgcctactttggatacagcaccccctgggggtactttgactttaaccgcttccacagccactggagcccccgagactggcaaagactcatcaacaactactggggcttcagaccccggtccctcagagtcaaaatcttcaacattcaagtcaaagaggtcacggtgcaggactccaccaccaccatcgccaacaacctcacctccaccgtccaagtgtttacggacgacgactaccagctgccctacgtcgtcggcaacgggaccgagggatgcctgccggccttccctccgcaggtctttacgctgccgcagtacggttacgcgacgctgaaccgcgacaacacagaaaatcccaccgagaggagcagcttcttctgcctagagtactttcccagcaagatgctgagaacgggcaacaactttgagtttacctacaactttgaggaggtgcccttccactccagcttcgctcccagtcagaacctcttcaagctggccaacccgctggtggaccagtacttgtaccgcttcgtgagcacaaataacactggcggagtccagttcaacaagaacctggccgggagatacgccaacacctacaaaaactggttcccggggcccatgggccgaacccagggctggaacctgggctccggggtcaaccgcgccagtgtcagcgccttcgccacgaccaataggatggagctcgagggcgcgagttaccaggtgcccccgcagccgaacggcatgaccaacaacctccagggcagcaacacctatgccctggagaacactatgatcttcaacagccagccggcgaacccgggcaccaccgccacgtacctcgagggcaacatgctcatcaccagcgagagcgagacgcagccggtgaaccgcgtggcgtacaacgtcggcgggcagatggccaccaacaaccagagctccaccactgcccccgcgaccggcacgtacaacctccaggaaatcgtgcccggcagcgtgtggatggagagggacgtgtacctccaaggacccatctgggccaagatcccagagacgggggcgcactttcacccctctccggccatgggcggattcggactcaaacacccaccgcccatgatgctcatcaagaacacgcctgtgcccggaaatatcaccagcttctcggacgtgcccgtcagcagcttcatcacccagtacagcaccgggcaggtcaccgtggagatggagtgggagctcaagaaggaaaactccaagaggtggaacccagagatccagtacacaaacaactacaacgacccccagtttgtggactttgccccggacagcaccggggaatacagaaccaccagacctatcggaacccgataccttacccgacccctttaa

SEQ ID NO: 6 - protein, 532 aa, Adeno-associated dependoparvovirus B
MSAGGGGPLGDNNQGADGVGNASGDWHCDSTWMGDRVVTKSTRTWVLPSYNNHQYREIKSGSVDGSNANAYFGYSTPWGYFDFNRFHSHWSPRDWQRLINNYWGFRPRSLRVKIFNIQVKEVTVQDSTTTIANNLTSTVQVFTDDDYQLPYVVGNGTEGCLPAFPPQVFTLPQYGYATLNRDNTENPTERSSFFCLEYFPSKMLRTGNNFEFTYNFEEVPFHSSFAPSQNLFKLANPLVDQYLYRFVSTNNTGGVQFNKNLAGRYANTYKNWFPGPMGRTQGWNLGSGVNRASVSAFATTNRMELEGASYQVPPQPNGMTNNLQGSNTYALENTMIFNSQPANPGTTATYLEGNMLITSESETQPVNRVAYNVGGQMATNNQSSTTAPATGTYNLQEIVPGSVWMERDVYLQGPIWAKIPETGAHFHPSPAMGGFGLKHPPPMMLIKNTPVPGNITSFSDVPVSSFITQYSTGQVTVEMEWELKKENSKRWNPEIQYTNNYNDPQFVDFAPDSTGEYRTTRPIGTRYLTRPL

SEQ ID NO: 7 - DNA, 2175 bp, synthetic construct
  source 1..2175: mol_type = other DNA
atggcttttgttgatcaccctccagattggttggaagaagttggtgaaggtcttcgcgagtttttgggccttgaagcgggcccaccgaaaccaaaacccaatcagcagcatcaagatcaagcccgtggtcttgtgctgcctggttataactatctcggacccggaaacggtctcgatcgaggagagcctgtcaacagggcagacgaggtcgcgcgagagcacgacatctcgtacaacgagcagcttgaggcgggagacaacccctacctcaagtacaaccacgcggacgccgagtttcaggagaagctcgccgacgacacatccttcgggggaaacctcggaaaggcagtctttcaggccaagaaaagggttctcgaaccttttggcctggttgaagagggtgctaagacggcccctaccggaaagcggatagacgaccactttccaaaaagaaagaaggctcggaccgaagaggactccaagccttccacctcgtcagacgccgaagctggacccagcggatcccagcagctgcaaatcccagcccaaccagcctcaagtttgggagctgatacaatgtctgcgggaggtggcggcccattgggcgacaataaccaaggtgccgatggagtgggcaatgcctcgggagattggcattgcgattccacgtggatgggggacagagtcgtcaccaagtccacccgaacctgggtgctgcccagctacaacaaccaccagtaccgagagatcaaaagcggctccgtcgacggaagcaacgccaacgcctactttggatacagcaccccctgggggtactttgactttaaccgcttccacagccactggagcccccgagactggcaaagactcatcaacaactactggggcttcagaccccggtccctcagagtcaaaatcttcaacattcaagtcaaagaggtcacggtgcaggactccaccaccaccatcgccaacaacctcacctccaccgtccaagtgtttacggacgacgactaccagctgccctacgtcgtcggcaacgggaccgagggatgcctgccggccttccctccgcaggtctttacgctgccgcagtacggttacgcgacgctgaaccgcgacaacacagaaaatcccaccgagaggagcagcttcttctgcctagagtactttcccagcaagatgctgagaacgggcaacaactttgagtttacctacaactttgaggaggtgcccttccactccagcttcgctcccagtcagaacctcttcaagctggccaacccgctggtggaccagtacttgtaccgcttcgtgagcacaaataacactggcggagtccagttcaacaagaacctggccgggagatacgccaacacctacaaaaactggttcccggggcccatgggccgaacccagggctggaacctgggctccggggtcaaccgcgccagtgtcagcgccttcgccacgaccaataggatggagctcgagggcgcgagttaccaggtgcccccgcagccgaacggcatgaccaacaacctccagggcagcaacacctatgccctggagaacactatgatcttcaacagccagccggcgaacccgggcaccaccgccacgtacctcgagggcaacatgctcatcaccagcgagagcgagacgcagccggtgaaccgcgtggcgtacaacgtcggcgggcagatggccaccaacaaccagagctccaccactgcccccgcgaccggcacgtacaacctccaggaaatcgtgcccggcagcgtgtggatggagagggacgtgtacctccaaggacccatctgggccaagatcccagagacgggggcgcactttcacccctctccggccatgggcggattcggactcaaacacccaccgcccatgatgctcatcaagaacacgcctgtgcccggaaatatcaccagcttctcggacgtgcccgtcagcagcttcatcacccagtacagcaccgggcaggtcaccgtggagatggagtgggagctcaagaaggaaaactccaagaggtggaacccagagatccagtacacaaacaactacaacgacccccagtttgtggactttgccccggacagcaccggggaatacagaagcaccagacctatcggaacccgataccttacccgacccctttaa

SEQ ID NO: 8 - protein, 724 aa, synthetic construct
MAFVDHPPDWLEEVGEGLREFLGLEAGPPKPKPNQQHQDQARGLVLPGYNYLGPGNGLDRGEPVNRADEVAREHDISYNEQLEAGDNPYLKYNHADAEFQEKLADDTSFGGNLGKAVFQAKKRVLEPFGLVEEGAKTAPTGKRIDDHFPKRKKARTEEDSKPSTSSDAEAGPSGSQQLQIPAQPASSLGADTMSAGGGGPLGDNNQGADGVGNASGDWHCDSTWMGDRVVTKSTRTWVLPSYNNHQYREIKSGSVDGSNANAYFGYSTPWGYFDFNRFHSHWSPRDWQRLINNYWGFRPRSLRVKIFNIQVKEVTVQDSTTTIANNLTSTVQVFTDDDYQLPYVVGNGTEGCLPAFPPQVFTLPQYGYATLNRDNTENPTERSSFFCLEYFPSKMLRTGNNFEFTYNFEEVPFHSSFAPSQNLFKLANPLVDQYLYRFVSTNNTGGVQFNKNLAGRYANTYKNWFPGPMGRTQGWNLGSGVNRASVSAFATTNRMELEGASYQVPPQPNGMTNNLQGSNTYALENTMIFNSQPANPGTTATYLEGNMLITSESETQPVNRVAYNVGGQMATNNQSSTTAPATGTYNLQEIVPGSVWMERDVYLQGPIWAKIPETGAHFHPSPAMGGFGLKHPPPMMLIKNTPVPGNITSFSDVPVSSFITQYSTGQVTVEMEWELKKENSKRWNPEIQYTNNYNDPQFVDFAPDSTGEYRSTRPIGTRYLTRPL

SEQ ID NO: 9 - DNA, 1767 bp, synthetic construct
  source 1..1767: mol_type = other DNA
acggcccctaccggaaagcggatagacgaccactttccaaaaagaaagaaggctcggaccgaagaggactccaagccttccacctcgtcagacgccgaagctggacccagcggatcccagcagctgcaaatcccagcccaaccagcctcaagtttgggagctgatacaatgtctgcgggaggtggcggcccattgggcgacaataaccaaggtgccgatggagtgggcaatgcctcgggagattggcattgcgattccacgtggatgggggacagagtcgtcaccaagtccacccgaacctgggtgctgcccagctacaacaaccaccagtaccgagagatcaaaagcggctccgtcgacggaagcaacgccaacgcctactttggatacagcaccccctgggggtactttgactttaaccgcttccacagccactggagcccccgagactggcaaagactcatcaacaactactggggcttcagaccccggtccctcagagtcaaaatcttcaacattcaagtcaaagaggtcacggtgcaggactccaccaccaccatcgccaacaacctcacctccaccgtccaagtgtttacggacgacgactaccagctgccctacgtcgtcggcaacgggaccgagggatgcctgccggccttccctccgcaggtctttacgctgccgcagtacggttacgcgacgctgaaccgcgacaacacagaaaatcccaccgagaggagcagcttcttctgcctagagtactttcccagcaagatgctgagaacgggcaacaactttgagtttacctacaactttgaggaggtgcccttccactccagcttcgctcccagtcagaacctcttcaagctggccaacccgctggtggaccagtacttgtaccgcttcgtgagcacaaataacactggcggagtccagttcaacaagaacctggccgggagatacgccaacacctacaaaaactggttcccggggcccatgggccgaacccagggctggaacctgggctccggggtcaaccgcgccagtgtcagcgccttcgccacgaccaataggatggagctcgagggcgcgagttaccaggtgcccccgcagccgaacggcatgaccaacaacctccagggcagcaacacctatgccctggagaacactatgatcttcaacagccagccggcgaacccgggcaccaccgccacgtacctcgagggcaacatgctcatcaccagcgagagcgagacgcagccggtgaaccgcgtggcgtacaacgtcggcgggcagatggccaccaacaaccagagctccaccactgcccccgcgaccggcacgtacaacctccaggaaatcgtgcccggcagcgtgtggatggagagggacgtgtacctccaaggacccatctgggccaagatcccagagacgggggcgcactttcacccctctccggccatgggcggattcggactcaaacacccaccgcccatgatgctcatcaagaacacgcctgtgcccggaaatatcaccagcttctcggacgtgcccgtcagcagcttcatcacccagtacagcaccgggcaggtcaccgtggagatggagtgggagctcaagaaggaaaactccaagaggtggaacccagagatccagtacacaaacaactacaacgacccccagtttgtggactttgccccggacagcaccggggaatacagaagcaccagacctatcggaacccgataccttacccgacccctttaa

SEQ ID NO: 10 - protein, 588 aa, synthetic construct
TAPTGKRIDDHFPKRKKARTEEDSKPSTSSDAEAGPSGSQQLQIPAQPASSLGADTMSAGGGGPLGDNNQGADGVGNASGDWHCDSTWMGDRVVTKSTRTWVLPSYNNHQYREIKSGSVDGSNANAYFGYSTPWGYFDFNRFHSHWSPRDWQRLINNYWGFRPRSLRVKIFNIQVKEVTVQDSTTTIANNLTSTVQVFTDDDYQLPYVVGNGTEGCLPAFPPQVFTLPQYGYATLNRDNTENPTERSSFFCLEYFPSKMLRTGNNFEFTYNFEEVPFHSSFAPSQNLFKLANPLVDQYLYRFVSTNNTGGVQFNKNLAGRYANTYKNWFPGPMGRTQGWNLGSGVNRASVSAFATTNRMELEGASYQVPPQPNGMTNNLQGSNTYALENTMIFNSQPANPGTTATYLEGNMLITSESETQPVNRVAYNVGGQMATNNQSSTTAPATGTYNLQEIVPGSVWMERDVYLQGPIWAKIPETGAHFHPSPAMGGFGLKHPPPMMLIKNTPVPGNITSFSDVPVSSFITQYSTGQVTVEMEWELKKENSKRWNPEIQYTNNYNDPQFVDFAPDSTGEYRSTRPIGTRYLTRPL

SEQ ID NO: 11 - DNA, 1599 bp, synthetic construct
  source 1..1599: mol_type = other DNA
atgtctgcgggaggtggcggcccattgggcgacaataaccaaggtgccgatggagtgggcaatgcctcgggagattggcattgcgattccacgtggatgggggacagagtcgtcaccaagtccacccgaacctgggtgctgcccagctacaacaaccaccagtaccgagagatcaaaagcggctccgtcgacggaagcaacgccaacgcctactttggatacagcaccccctgggggtactttgactttaaccgcttccacagccactggagcccccgagactggcaaagactcatcaacaactactggggcttcagaccccggtccctcagagtcaaaatcttcaacattcaagtcaaagaggtcacggtgcaggactccaccaccaccatcgccaacaacctcacctccaccgtccaagtgtttacggacgacgactaccagctgccctacgtcgtcggcaacgggaccgagggatgcctgccggccttccctccgcaggtctttacgctgccgcagtacggttacgcgacgctgaaccgcgacaacacagaaaatcccaccgagaggagcagcttcttctgcctagagtactttcccagcaagatgctgagaacgggcaacaactttgagtttacctacaactttgaggaggtgcccttccactccagcttcgctcccagtcagaacctcttcaagctggccaacccgctggtggaccagtacttgtaccgcttcgtgagcacaaataacactggcggagtccagttcaacaagaacctggccgggagatacgccaacacctacaaaaactggttcccggggcccatgggccgaacccagggctggaacctgggctccggggtcaaccgcgccagtgtcagcgccttcgccacgaccaataggatggagctcgagggcgcgagttaccaggtgcccccgcagccgaacggcatgaccaacaacctccagggcagcaacacctatgccctggagaacactatgatcttcaacagccagccggcgaacccgggcaccaccgccacgtacctcgagggcaacatgctcatcaccagcgagagcgagacgcagccggtgaaccgcgtggcgtacaacgtcggcgggcagatggccaccaacaaccagagctccaccactgcccccgcgaccggcacgtacaacctccaggaaatcgtgcccggcagcgtgtggatggagagggacgtgtacctccaaggacccatctgggccaagatcccagagacgggggcgcactttcacccctctccggccatgggcggattcggactcaaacacccaccgcccatgatgctcatcaagaacacgcctgtgcccggaaatatcaccagcttctcggacgtgcccgtcagcagcttcatcacccagtacagcaccgggcaggtcaccgtggagatggagtgggagctcaagaaggaaaactccaagaggtggaacccagagatccagtacacaaacaactacaacgacccccagtttgtggactttgccccggacagcaccggggaatacagaagcaccagacctatcggaacccgataccttacccgacccctttaa

SEQ ID NO: 12 - protein, 532 aa, synthetic construct
MSAGGGGPLGDNNQGADGVGNASGDWHCDSTWMGDRVVTKSTRTWVLPSYNNHQYREIKSGSVDGSNANAYFGYSTPWGYFDFNRFHSHWSPRDWQRLINNYWGFRPRSLRVKIFNIQVKEVTVQDSTTTIANNLTSTVQVFTDDDYQLPYVVGNGTEGCLPAFPPQVFTLPQYGYATLNRDNTENPTERSSFFCLEYFPSKMLRTGNNFEFTYNFEEVPFHSSFAPSQNLFKLANPLVDQYLYRFVSTNNTGGVQFNKNLAGRYANTYKNWFPGPMGRTQGWNLGSGVNRASVSAFATTNRMELEGASYQVPPQPNGMTNNLQGSNTYALENTMIFNSQPANPGTTATYLEGNMLITSESETQPVNRVAYNVGGQMATNNQSSTTAPATGTYNLQEIVPGSVWMERDVYLQGPIWAKIPETGAHFHPSPAMGGFGLKHPPPMMLIKNTPVPGNITSFSDVPVSSFITQYSTGQVTVEMEWELKKENSKRWNPEIQYTNNYNDPQFVDFAPDSTGEYRSTRPIGTRYLTRPL

SEQ ID NO: 13 - DNA, 2175 bp, synthetic construct
  source 1..2175: mol_type = other DNA
atgtcttttgttgatcaccctccagattggttggaagaagttggtgaaggtcttcgcgagtttttgggccttgaagcgggcccaccgaaaccaaaacccaatcagcagcatcaagatcaagcccgtggtcttgtgctgcctggttataactatctcggacccggaaacggtctcgatcgaggagagcctgtcaacagggcagacgaggtcgcgcgagagcacgacatctcgtacaacgagcagcttgaggcgggagacaacccctacctcaagtacaaccacgcggacgccgagtttcaggagaagctcgccgacgacacatccttcgggggaaacctcggaaaggcagtctttcaggccaagaaaagggttctcgaaccttttggcctggttgaagagggtgctaagacggcccctaccggaaagcggatagacgaccactttccaaaaagaaagaaggctcggaccgaagaggactccaagccttccacctcgtcagacgccgaagctggacccagcggatcccagcagctgcaaatcccagcccaaccagcctcaagtttgggagctgatacaatgtctgcgggaggtggcggcccattgggcgacaataaccaaggtgccgatggagtgggcaatgcctcgggagattggcattgcgattccacgtggatggccgacagagtcgtcaccaagtccacccgaacctgggtgctgcccagctacaacaaccaccagtaccgagagatcaaaagcggctccgtcgacggaagcaacgccaacgcctactttggatacagcaccccctgggggtactttgactttaaccgcttccacagccactggagcccccgagactggcaaagactcatcaacaactactggggcttcagaccccggtccctcagagtcaaaatcttcaacattcaagtcaaagaggtcacggtgcaggactccaccaccaccatcgccaacaacctcacctccaccgtccaagtgtttacggacgacgactaccagctgccctacgtcgtcggcaacgggaccgagggatgcctgccggccttccctccgcaggtctttacgctgccgcagtacggttacgcgacgctgaaccgcgacaacacagaaaatcccaccgagaggagcagcttcttctgcctagagtactttcccagcaagatgctgagaacgggcaacaactttgagtttacctacaactttgaggaggtgcccttccactccagcttcgctcccagtcagaacctcttcaagctggccaacccgctggtggaccagtacttgtaccgcttcgtgagcacaaataacactggcggagtccagttcaacaagaacctggccgggagatacgccaacacctacaaaaactggttcccggggcccatgggccgaacccagggctggaacctgggctccggggtcaaccgcgccagtgtcagcgccttcgccacgaccaataggatggagctcgagggcgcgagttaccaggtgcccccgcagccgaacggcatgaccaacaacctccagggcagcaacacctatgccctggagaacactatgatcttcaacagccagccggcgaacccgggcaccaccgccacgtacctcgagggcaacatgctcatcaccagcgagagcgagacgcagccggtgaaccgcgtggcgtacaacgtcggcgggcagatggccaccaacaaccagagctccaccactgcccccgcgaccggcacgtacaacctccaggaaatcgtgcccggcagcgtgtggatggagagggacgtgtacctccaaggacccatctgggccaagatcccagagacgggggcgcactttcacccctctccggccatgggcggattcggactcaaacacccaccgcccatgatgctcatcaagaacacgcctgtgcccggaaatatcaccagcttctcggacgtgcccgtcagcagcttcatcacccagtacagcaccgggcaggtcaccgtggagatggagtgggagctcaagaaggaaaactccaagaggtggaacccagagatccagtacacaaacaactacaacgacccccagtttgtggactttgccccggacagcaccggggaatacagaaccaccagacctatcggaacccgataccttacccgacccctttaa

SEQ ID NO: 14 - protein, 724 aa, synthetic construct
MSFVDHPPDWLEEVGEGLREFLGLEAGPPKPKPNQQHQDQARGLVLPGYNYLGPGNGLDRGEPVNRADEVAREHDISYNEQLEAGDNPYLKYNHADAEFQEKLADDTSFGGNLGKAVFQAKKRVLEPFGLVEEGAKTAPTGKRIDDHFPKRKKARTEEDSKPSTSSDAEAGPSGSQQLQIPAQPASSLGADTMSAGGGGPLGDNNQGADGVGNASGDWHCDSTWMADRVVTKSTRTWVLPSYNNHQYREIKSGSVDGSNANAYFGYSTPWGYFDFNRFHSHWSPRDWQRLINNYWGFRPRSLRVKIFNIQVKEVTVQDSTTTIANNLTSTVQVFTDDDYQLPYVVGNGTEGCLPAFPPQVFTLPQYGYATLNRDNTENPTERSSFFCLEYFPSKMLRTGNNFEFTYNFEEVPFHSSFAPSQNLFKLANPLVDQYLYRFVSTNNTGGVQFNKNLAGRYANTYKNWFPGPMGRTQGWNLGSGVNRASVSAFATTNRMELEGASYQVPPQPNGMTNNLQGSNTYALENTMIFNSQPANPGTTATYLEGNMLITSESETQPVNRVAYNVGGQMATNNQSSTTAPATGTYNLQEIVPGSVWMERDVYLQGPIWAKIPETGAHFHPSPAMGGFGLKHPPPMMLIKNTPVPGNITSFSDVPVSSFITQYSTGQVTVEMEWELKKENSKRWNPEIQYTNNYNDPQFVDFAPDSTGEYRTTRPIGTRYLTRPL

SEQ ID NO: 15 - DNA, 1767 bp, synthetic construct
  source 1..1767: mol_type = other DNA
acggcccctaccggaaagcggatagacgaccactttccaaaaagaaagaaggctcggaccgaagaggactccaagccttccacctcgtcagacgccgaagctggacccagcggatcccagcagctgcaaatcccagcccaaccagcctcaagtttgggagctgatacaatgtctgcgggaggtggcggcccattgggcgacaataaccaaggtgccgatggagtgggcaatgcctcgggagattggcattgcgattccacgtggatggccgacagagtcgtcaccaagtccacccgaacctgggtgctgcccagctacaacaaccaccagtaccgagagatcaaaagcggctccgtcgacggaagcaacgccaacgcctactttggatacagcaccccctgggggtactttgactttaaccgcttccacagccactggagcccccgagactggcaaagactcatcaacaactactggggcttcagaccccggtccctcagagtcaaaatcttcaacattcaagtcaaagaggtcacggtgcaggactccaccaccaccatcgccaacaacctcacctccaccgtccaagtgtttacggacgacgactaccagctgccctacgtcgtcggcaacgggaccgagggatgcctgccggccttccctccgcaggtctttacgctgccgcagtacggttacgcgacgctgaaccgcgacaacacagaaaatcccaccgagaggagcagcttcttctgcctagagtactttcccagcaagatgctgagaacgggcaacaactttgagtttacctacaactttgaggaggtgcccttccactccagcttcgctcccagtcagaacctcttcaagctggccaacccgctggtggaccagtacttgtaccgcttcgtgagcacaaataacactggcggagtccagttcaacaagaacctggccgggagatacgccaacacctacaaaaactggttcccggggcccatgggccgaacccagggctggaacctgggctccggggtcaaccgcgccagtgtcagcgccttcgccacgaccaataggatggagctcgagggcgcgagttaccaggtgcccccgcagccgaacggcatgaccaacaacctccagggcagcaacacctatgccctggagaacactatgatcttcaacagccagccggcgaacccgggcaccaccgccacgtacctcgagggcaacatgctcatcaccagcgagagcgagacgcagccggtgaaccgcgtggcgtacaacgtcggcgggcagatggccaccaacaaccagagctccaccactgcccccgcgaccggcacgtacaacctccaggaaatcgtgcccggcagcgtgtggatggagagggacgtgtacctccaaggacccatctgggccaagatcccagagacgggggcgcactttcacccctctccggccatgggcggattcggactcaaacacccaccgcccatgatgctcatcaagaacacgcctgtgcccggaaatatcaccagcttctcggacgtgcccgtcagcagcttcatcacccagtacagcaccgggcaggtcaccgtggagatggagtgggagctcaagaaggaaaactccaagaggtggaacccagagatccagtacacaaacaactacaacgacccccagtttgtggactttgccccggacagcaccggggaatacagaaccaccagacctatcggaacccgataccttacccgacccctttaa

SEQ ID NO: 16 - protein, 588 aa, synthetic construct
TAPTGKRIDDHFPKRKKARTEEDSKPSTSSDAEAGPSGSQQLQIPAQPASSLGADTMSAGGGGPLGDNNQGADGVGNASGDWHCDSTWMADRVVTKSTRTWVLPSYNNHQYREIKSGSVDGSNANAYFGYSTPWGYFDFNRFHSHWSPRDWQRLINNYWGFRPRSLRVKIFNIQVKEVTVQDSTTTIANNLTSTVQVFTDDDYQLPYVVGNGTEGCLPAFPPQVFTLPQYGYATLNRDNTENPTERSSFFCLEYFPSKMLRTGNNFEFTYNFEEVPFHSSFAPSQNLFKLANPLVDQYLYRFVSTNNTGGVQFNKNLAGRYANTYKNWFPGPMGRTQGWNLGSGVNRASVSAFATTNRMELEGASYQVPPQPNGMTNNLQGSNTYALENTMIFNSQPANPGTTATYLEGNMLITSESETQPVNRVAYNVGGQMATNNQSSTTAPATGTYNLQEIVPGSVWMERDVYLQGPIWAKIPETGAHFHPSPAMGGFGLKHPPPMMLIKNTPVPGNITSFSDVPVSSFITQYSTGQVTVEMEWELKKENSKRWNPEIQYTNNYNDPQFVDFAPDSTGEYRTTRPIGTRYLTRPL

SEQ ID NO: 17 - DNA, 1599 bp, synthetic construct
  source 1..1599: mol_type = other DNA
atgtctgcgggaggtggcggcccattgggcgacaataaccaaggtgccgatggagtgggcaatgcctcgggagattggcattgcgattccacgtggatggccgacagagtcgtcaccaagtccacccgaacctgggtgctgcccagctacaacaaccaccagtaccgagagatcaaaagcggctccgtcgacggaagcaacgccaacgcctactttggatacagcaccccctgggggtactttgactttaaccgcttccacagccactggagcccccgagactggcaaagactcatcaacaactactggggcttcagaccccggtccctcagagtcaaaatcttcaacattcaagtcaaagaggtcacggtgcaggactccaccaccaccatcgccaacaacctcacctccaccgtccaagtgtttacggacgacgactaccagctgccctacgtcgtcggcaacgggaccgagggatgcctgccggccttccctccgcaggtctttacgctgccgcagtacggttacgcgacgctgaaccgcgacaacacagaaaatcccaccgagaggagcagcttcttctgcctagagtactttcccagcaagatgctgagaacgggcaacaactttgagtttacctacaactttgaggaggtgcccttccactccagcttcgctcccagtcagaacctcttcaagctggccaacccgctggtggaccagtacttgtaccgcttcgtgagcacaaataacactggcggagtccagttcaacaagaacctggccgggagatacgccaacacctacaaaaactggttcccggggcccatgggccgaacccagggctggaacctgggctccggggtcaaccgcgccagtgtcagcgccttcgccacgaccaataggatggagctcgagggcgcgagttaccaggtgcccccgcagccgaacggcatgaccaacaacctccagggcagcaacacctatgccctggagaacactatgatcttcaacagccagccggcgaacccgggcaccaccgccacgtacctcgagggcaacatgctcatcaccagcgagagcgagacgcagccggtgaaccgcgtggcgtacaacgtcggcgggcagatggccaccaacaaccagagctccaccactgcccccgcgaccggcacgtacaacctccaggaaatcgtgcccggcagcgtgtggatggagagggacgtgtacctccaaggacccatctgggccaagatcccagagacgggggcgcactttcacccctctccggccatgggcggattcggactcaaacacccaccgcccatgatgctcatcaagaacacgcctgtgcccggaaatatcaccagcttctcggacgtgcccgtcagcagcttcatcacccagtacagcaccgggcaggtcaccgtggagatggagtgggagctcaagaaggaaaactccaagaggtggaacccagagatccagtacacaaacaactacaacgacccccagtttgtggactttgccccggacagcaccggggaatacagaaccaccagacctatcggaacccgataccttacccgacccctttaa

SEQ ID NO: 18 - protein, 532 aa, synthetic construct
MSAGGGGPLGDNNQGADGVGNASGDWHCDSTWMADRVVTKSTRTWVLPSYNNHQYREIKSGSVDGSNANAYFGYSTPWGYFDFNRFHSHWSPRDWQRLINNYWGFRPRSLRVKIFNIQVKEVTVQDSTTTIANNLTSTVQVFTDDDYQLPYVVGNGTEGCLPAFPPQVFTLPQYGYATLNRDNTENPTERSSFFCLEYFPSKMLRTGNNFEFTYNFEEVPFHSSFAPSQNLFKLANPLVDQYLYRFVSTNNTGGVQFNKNLAGRYANTYKNWFPGPMGRTQGWNLGSGVNRASVSAFATTNRMELEGASYQVPPQPNGMTNNLQGSNTYALENTMIFNSQPANPGTTATYLEGNMLITSESETQPVNRVAYNVGGQMATNNQSSTTAPATGTYNLQEIVPGSVWMERDVYLQGPIWAKIPETGAHFHPSPAMGGFGLKHPPPMMLIKNTPVPGNITSFSDVPVSSFITQYSTGQVTVEMEWELKKENSKRWNPEIQYTNNYNDPQFVDFAPDSTGEYRTTRPIGTRYLTRPL

SEQ ID NO: 19 - DNA, 2175 bp, synthetic construct
  source 1..2175: mol_type = other DNA
atggcttttgttgatcaccctccagattggttggaagaagttggtgaaggtcttcgcgagtttttgggccttgaagcgggcccaccgaaaccaaaacccaatcagcagcatcaagatcaagcccgtggtcttgtgctgcctggttataactatctcggacccggaaacggtctcgatcgaggagagcctgtcaacagggcagacgaggtcgcgcgagagcacgacatctcgtacaacgagcagcttgaggcgggagacaacccctacctcaagtacaaccacgcggacgccgagtttcaggagaagctcgccgacgacacatccttcgggggaaacctcggaaaggcagtctttcaggccaagaaaagggttctcgaaccttttggcctggttgaagagggtgctaagacggcccctaccggaaagcggatagacgaccactttccaaaaagaaagaaggctcggaccgaagaggactccaagccttccacctcgtcagacgccgaagctggacccagcggatcccagcagctgcaaatcccagcccaaccagcctcaagtttgggagctgatacaatgtctgcgggaggtggcggcccattgggcgacaataaccaaggtgccgatggagtgggcaatgcctcgggagattggcattgcgattccacgtggatggccgacagagtcgtcaccaagtccacccgaacctgggtgctgcccagctacaacaaccaccagtaccgagagatcaaaagcggctccgtcgacggaagcaacgccaacgcctactttggatacagcaccccctgggggtactttgactttaaccgcttccacagccactggagcccccgagactggcaaagactcatcaacaactactggggcttcagaccccggtccctcagagtcaaaatcttcaacattcaagtcaaagaggtcacggtgcaggactccaccaccaccatcgccaacaacctcacctccaccgtccaagtgtttacggacgacgactaccagctgccctacgtcgtcggcaacgggaccgagggatgcctgccggccttccctccgcaggtctttacgctgccgcagtacggttacgcgacgctgaaccgcgacaacacagaaaatcccaccgagaggagcagcttcttctgcctagagtactttcccagcaagatgctgagaacgggcaacaactttgagtttacctacaactttgaggaggtgcccttccactccagcttcgctcccagtcagaacctcttcaagctggccaacccgctggtggaccagtacttgtaccgcttcgtgagcacaaataacactggcggagtccagttcaacaagaacctggccgggagatacgccaacacctacaaaaactggttcccggggcccatgggccgaacccagggctggaacctgggctccggggtcaaccgcgccagtgtcagcgccttcgccacgaccaataggatggagctcgagggcgcgagttaccaggtgcccccgcagccgaacggcatgaccaacaacctccagggcagcaacacctatgccctggagaacactatgatcttcaacagccagccggcgaacccgggcaccaccgccacgtacctcgagggcaacatgctcatcaccagcgagagcgagacgcagccggtgaaccgcgtggcgtacaacgtcggcgggcagatggccaccaacaaccagagctccaccactgcccccgcgaccggcacgtacaacctccaggaaatcgtgcccggcagcgtgtggatggagagggacgtgtacctccaaggacccatctgggccaagatcccagagacgggggcgcactttcacccctctccggccatgggcggattcggactcaaacacccaccgcccatgatgctcatcaagaacacgcctgtgcccggaaatatcaccagcttctcggacgtgcccgtcagcagcttcatcacccagtacagcaccgggcaggtcaccgtggagatggagtgggagctcaagaaggaaaactccaagaggtggaacccagagatccagtacacaaacaactacaacgacccccagtttgtggactttgccccggacagcaccggggaatacagaagcaccagacctatcggaacccgataccttacccgacccctttaa

SEQ ID NO: 20 - protein, 724 aa, synthetic construct
MAFVDHPPDWLEEVGEGLREFLGLEAGPPKPKPNQQHQDQARGLVLPGYNYLGPGNGLDRGEPVNRADEVAREHDISYNEQLEAGDNPYLKYNHADAEFQEKLADDTSFGGNLGKAVFQAKKRVLEPFGLVEEGAKTAPTGKRIDDHFPKRKKARTEEDSKPSTSSDAEAGPSGSQQLQIPAQPASSLGADTMSAGGGGPLGDNNQGADGVGNASGDWHCDSTWMADRVVTKSTRTWVLPSYNNHQYREIKSGSVDGSNANAYFGYSTPWGYFDFNRFHSHWSPRDWQRLINNYWGFRPRSLRVKIFNIQVKEVTVQDSTTTIANNLTSTVQVFTDDDYQLPYVVGNGTEGCLPAFPPQVFTLPQYGYATLNRDNTENPTERSSFFCLEYFPSKMLRTGNNFEFTYNFEEVPFHSSFAPSQNLFKLANPLVDQYLYRFVSTNNTGGVQFNKNLAGRYANTYKNWFPGPMGRTQGWNLGSGVNRASVSAFATTNRMELEGASYQVPPQPNGMTNNLQGSNTYALENTMIFNSQPANPGTTATYLEGNMLITSESETQPVNRVAYNVGGQMATNNQSSTTAPATGTYNLQEIVPGSVWMERDVYLQGPIWAKIPETGAHFHPSPAMGGFGLKHPPPMMLIKNTPVPGNITSFSDVPVSSFITQYSTGQVTVEMEWELKKENSKRWNPEIQYTNNYNDPQFVDFAPDSTGEYRSTRPIGTRYLTRPL

SEQ ID NO: 21 - DNA, 1767 bp, synthetic construct
  source 1..1767: mol_type = other DNA
acggcccctaccggaaagcggatagacgaccactttccaaaaagaaagaaggctcggaccgaagaggactccaagccttccacctcgtcagacgccgaagctggacccagcggatcccagcagctgcaaatcccagcccaaccagcctcaagtttgggagctgatacaatgtctgcgggaggtggcggcccattgggcgacaataaccaaggtgccgatggagtgggcaatgcctcgggagattggcattgcgattccacgtggatggccgacagagtcgtcaccaagtccacccgaacctgggtgctgcccagctacaacaaccaccagtaccgagagatcaaaagcggctccgtcgacggaagcaacgccaacgcctactttggatacagcaccccctgggggtactttgactttaaccgcttccacagccactggagcccccgagactggcaaagactcatcaacaactactggggcttcagaccccggtccctcagagtcaaaatcttcaacattcaagtcaaagaggtcacggtgcaggactccaccaccaccatcgccaacaacctcacctccaccgtccaagtgtttacggacgacgactaccagctgccctacgtcgtcggcaacgggaccgagggatgcctgccggccttccctccgcaggtctttacgctgccgcagtacggttacgcgacgctgaaccgcgacaacacagaaaatcccaccgagaggagcagcttcttctgcctagagtactttcccagcaagatgctgagaacgggcaacaactttgagtttacctacaactttgaggaggtgcccttccactccagcttcgctcccagtcagaacctcttcaagctggccaacccgctggtggaccagtacttgtaccgcttcgtgagcacaaataacactggcggagtccagttcaacaagaacctggccgggagatacgccaacacctacaaaaactggttcccggggcccatgggccgaacccagggctggaacctgggctccggggtcaaccgcgccagtgtcagcgccttcgccacgaccaataggatggagctcgagggcgcgagttaccaggtgcccccgcagccgaacggcatgaccaacaacctccagggcagcaacacctatgccctggagaacactatgatcttcaacagccagccggcgaacccgggcaccaccgccacgtacctcgagggcaacatgctcatcaccagcgagagcgagacgcagccggtgaaccgcgtggcgtacaacgtcggcgggcagatggccaccaacaaccagagctccaccactgcccccgcgaccggcacgtacaacctccaggaaatcgtgcccggcagcgtgtggatggagagggacgtgtacctccaaggacccatctgggccaagatcccagagacgggggcgcactttcacccctctccggccatgggcggattcggactcaaacacccaccgcccatgatgctcatcaagaacacgcctgtgcccggaaatatcaccagcttctcggacgtgcccgtcagcagcttcatcacccagtacagcaccgggcaggtcaccgtggagatggagtgggagctcaagaaggaaaactccaagaggtggaacccagagatccagtacacaaacaactacaacgacccccagtttgtggactttgccccggacagcaccggggaatacagaagcaccagacctatcggaacccgataccttacccgacccctttaa

SEQ ID NO: 22 - protein, 588 aa, synthetic construct
TAPTGKRIDDHFPKRKKARTEEDSKPSTSSDAEAGPSGSQQLQIPAQPASSLGADTMSAGGGGPLGDNNQGADGVGNASGDWHCDSTWMADRVVTKSTRTWVLPSYNNHQYREIKSGSVDGSNANAYFGYSTPWGYFDFNRFHSHWSPRDWQRLINNYWGFRPRSLRVKIFNIQVKEVTVQDSTTTIANNLTSTVQVFTDDDYQLPYVVGNGTEGCLPAFPPQVFTLPQYGYATLNRDNTENPTERSSFFCLEYFPSKMLRTGNNFEFTYNFEEVPFHSSFAPSQNLFKLANPLVDQYLYRFVSTNNTGGVQFNKNLAGRYANTYKNWFPGPMGRTQGWNLGSGVNRASVSAFATTNRMELEGASYQVPPQPNGMTNNLQGSNTYALENTMIFNSQPANPGTTATYLEGNMLITSESETQPVNRVAYNVGGQMATNNQSSTTAPATGTYNLQEIVPGSVWMERDVYLQGPIWAKIPETGAHFHPSPAMGGFGLKHPPPMMLIKNTPVPGNITSFSDVPVSSFITQYSTGQVTVEMEWELKKENSKRWNPEIQYTNNYNDPQFVDFAPDSTGEYRSTRPIGTRYLTRPL

SEQ ID NO: 23 - DNA, 1599 bp, synthetic construct
  source 1..1599: mol_type = other DNA
atgtctgcgggaggtggcggcccattgggcgacaataaccaaggtgccgatggagtgggcaatgcctcgggagattggcattgcgattccacgtggatggccgacagagtcgtcaccaagtccacccgaacctgggtgctgcccagctacaacaaccaccagtaccgagagatcaaaagcggctccgtcgacggaagcaacgccaacgcctactttggatacagcaccccctgggggtactttgactttaaccgcttccacagccactggagcccccgagactggcaaagactcatcaacaactactggggcttcagaccccggtccctcagagtcaaaatcttcaacattcaagtcaaagaggtcacggtgcaggactccaccaccaccatcgccaacaacctcacctccaccgtccaagtgtttacggacgacgactaccagctgccctacgtcgtcggcaacgggaccgagggatgcctgccggccttccctccgcaggtctttacgctgccgcagtacggttacgcgacgctgaaccgcgacaacacagaaaatcccaccgagaggagcagcttcttctgcctagagtactttcccagcaagatgctgagaacgggcaacaactttgagtttacctacaactttgaggaggtgcccttccactccagcttcgctcccagtcagaacctcttcaagctggccaacccgctggtggaccagtacttgtaccgcttcgtgagcacaaataacactggcggagtccagttcaacaagaacctggccgggagatacgccaacacctacaaaaactggttcccggggcccatgggccgaacccagggctggaacctgggctccggggtcaaccgcgccagtgtcagcgccttcgccacgaccaataggatggagctcgagggcgcgagttaccaggtgcccccgcagccgaacggcatgaccaacaacctccagggcagcaacacctatgccctggagaacactatgatcttcaacagccagccggcgaacccgggcaccaccgccacgtacctcgagggcaacatgctcatcaccagcgagagcgagacgcagccggtgaaccgcgtggcgtacaacgtcggcgggcagatggccaccaacaaccagagctccaccactgcccccgcgaccggcacgtacaacctccaggaaatcgtgcccggcagcgtgtggatggagagggacgtgtacctccaaggacccatctgggccaagatcccagagacgggggcgcactttcacccctctccggccatgggcggattcggactcaaacacccaccgcccatgatgctcatcaagaacacgcctgtgcccggaaatatcaccagcttctcggacgtgcccgtcagcagcttcatcacccagtacagcaccgggcaggtcaccgtggagatggagtgggagctcaagaaggaaaactccaagaggtggaacccagagatccagtacacaaacaactacaacgacccccagtttgtggactttgccccggacagcaccggggaatacagaagcaccagacctatcggaacccgataccttacccgacccctttaa

SEQ ID NO: 24 - protein, 532 aa, synthetic construct
MSAGGGGPLGDNNQGADGVGNASGDWHCDSTWMADRVVTKSTRTWVLPSYNNHQYREIKSGSVDGSNANAYFGYSTPWGYFDFNRFHSHWSPRDWQRLINNYWGFRPRSLRVKIFNIQVKEVTVQDSTTTIANNLTSTVQVFTDDDYQLPYVVGNGTEGCLPAFPPQVFTLPQYGYATLNRDNTENPTERSSFFCLEYFPSKMLRTGNNFEFTYNFEEVPFHSSFAPSQNLFKLANPLVDQYLYRFVSTNNTGGVQFNKNLAGRYANTYKNWFPGPMGRTQGWNLGSGVNRASVSAFATTNRMELEGASYQVPPQPNGMTNNLQGSNTYALENTMIFNSQPANPGTTATYLEGNMLITSESETQPVNRVAYNVGGQMATNNQSSTTAPATGTYNLQEIVPGSVWMERDVYLQGPIWAKIPETGAHFHPSPAMGGFGLKHPPPMMLIKNTPVPGNITSFSDVPVSSFITQYSTGQVTVEMEWELKKENSKRWNPEIQYTNNYNDPQFVDFAPDSTGEYRSTRPIGTRYLTRPL

SEQ ID NO: 25 - DNA, 2175 bp, synthetic construct
  source 1..2175: mol_type = other DNA
atgtcttttgttgatcaccctccagattggttggaagaagttggtgaaggtcttcgcgagtttttgggccttgaagcgggcccaccgaaaccaaaacccaatcagcagcatcaagatcaagcccgtggtcttgtgctgcctggttataactatctcggacccggaaacggtctcgatcgaggagagcctgtcaacagggcagacgaggtcgcgcgagagcacgacatctcgtacaacgagcagcttgaggcgggagacaacccctacctcaagtacaaccacgcggacgccgagtttcaggagaagctcgccgacgacacatccttcgggggaaacctcggaaaggcagtctttcaggccaagaaaagggttctcgaaccttttggcctggttgaagagggtgctaagacggcccctaccggaaagcggatagacgaccactttccaaaaagaaagaaggctcggaccgaagaggactccaagccttccacctcgtcagacgccgaagctggacccagcggatcccagcagctgcaaatcccagcccaaccagcctcaagtttgggagctgatacaatgtctgcgggaggtggcggcccattgggcgacaataaccaaggtgccgatggagtgggcaatgcctcgggagattggcattgcgattccacgtggatgggggacagagtcgtcaccaagtccacccgaacctgggtgctgcccagctacaacaaccaccagtaccgagagatcaaaagcggctccgtcgacggaagcaacgccaacgcctactttggatacagcaccccctgggggtactttgactttaaccgcttccacagccactggagcccccgagagtggcaaagactcatcaacaactactggggcttcagaccccggtccctcagagtcaaaatcttcaacattcaagtcaaagaggtcacggtgcaggactccaccaccaccatcgccaacaacctcacctccaccgtccaagtgtttacggacgacgactaccagctgccctacgtcgtcggcaacgggaccgagggatgcctgccggccttccctccgcaggtctttacgctgccgcagtacggttacgcgacgctgaaccgcgacaacacagaaaatcccaccgagaggagcagcttcttctgcctagagtactttcccagcaagatgctgagaacgggcaacaactttgagtttacctacaactttgaggaggtgcccttccactccagcttcgctcccagtcagaacctcttcaagctggccaacccgctggtggaccagtacttgtaccgcttcgtgagcacaaataacactggcggagtccagttcaacaagaacctggccgggagatacgccaacacctacaaaaactggttcccggggcccatgggccgaacccagggctggaacctgggctccggggtcaaccgcgccagtgtcagcgccttcgccacgaccaataggatggagctcgagggcgcgagttaccaggtgcccccgcagccgaacggcatgaccaacaacctccagggcagcaacacctatgccctggagaacactatgatcttcaacagccagccggcgaacccgggcaccaccgccacgtacctcgagggcaacatgctcatcaccagcgagagcgagacgcagccggtgaaccgcgtggcgtacaacgtcggcgggcagatggccaccaacaaccagagctccaccactgcccccgcgaccggcacgtacaacctccaggaaatcgtgcccggcagcgtgtggatggagagggacgtgtacctccaaggacccatctgggccaagatcccagagacgggggcgcactttcacccctctccggccatgggcggattcggactcaaacacccaccgcccatgatgctcatcaagaacacgcctgtgcccggaaatatcaccagcttctcggacgtgcccgtcagcagcttcatcacccagtacagcaccgggcaggtcaccgtggagatggagtgggagctcaagaaggaaaactccaagaggtggaacccagagatccagtacacaaacaactacaacgacccccagtttgtggactttgccccggacagcaccggggaatacagaaccaccagacctatcggaacccgataccttacccgacccctttaa

SEQ ID NO: 26 - protein, 724 aa, synthetic construct
MSFVDHPPDWLEEVGEGLREFLGLEAGPPKPKPNQQHQDQARGLVLPGYNYLGPGNGLDRGEPVNRADEVAREHDISYNEQLEAGDNPYLKYNHADAEFQEKLADDTSFGGNLGKAVFQAKKRVLEPFGLVEEGAKTAPTGKRIDDHFPKRKKARTEEDSKPSTSSDAEAGPSGSQQLQIPAQPASSLGADTMSAGGGGPLGDNNQGADGVGNASGDWHCDSTWMGDRVVTKSTRTWVLPSYNNHQYREIKSGSVDGSNANAYFGYSTPWGYFDFNRFHSHWSPREWQRLINNYWGFRPRSLRVKIFNIQVKEVTVQDSTTTIANNLTSTVQVFTDDDYQLPYVVGNGTEGCLPAFPPQVFTLPQYGYATLNRDNTENPTERSSFFCLEYFPSKMLRTGNNFEFTYNFEEVPFHSSFAPSQNLFKLANPLVDQYLYRFVSTNNTGGVQFNKNLAGRYANTYKNWFPGPMGRTQGWNLGSGVNRASVSAFATTNRMELEGASYQVPPQPNGMTNNLQGSNTYALENTMIFNSQPANPGTTATYLEGNMLITSESETQPVNRVAYNVGGQMATNNQSSTTAPATGTYNLQEIVPGSVWMERDVYLQGPIWAKIPETGAHFHPSPAMGGFGLKHPPPMMLIKNTPVPGNITSFSDVPVSSFITQYSTGQVTVEMEWELKKENSKRWNPEIQYTNNYNDPQFVDFAPDSTGEYRTTRPIGTRYLTRPL

SEQ ID NO: 27 - DNA, 1767 bp, synthetic construct
  source 1..1767: mol_type = other DNA
acggcccctaccggaaagcggatagacgaccactttccaaaaagaaagaaggctcggaccgaagaggactccaagccttccacctcgtcagacgccgaagctggacccagcggatcccagcagctgcaaatcccagcccaaccagcctcaagtttgggagctgatacaatgtctgcgggaggtggcggcccattgggcgacaataaccaaggtgccgatggagtgggcaatgcctcgggagattggcattgcgattccacgtggatgggggacagagtcgtcaccaagtccacccgaacctgggtgctgcccagctacaacaaccaccagtaccgagagatcaaaagcggctccgtcgacggaagcaacgccaacgcctactttggatacagcaccccctgggggtactttgactttaaccgcttccacagccactggagcccccgagagtggcaaagactcatcaacaactactggggcttcagaccccggtccctcagagtcaaaatcttcaacattcaagtcaaagaggtcacggtgcaggactccaccaccaccatcgccaacaacctcacctccaccgtccaagtgtttacggacgacgactaccagctgccctacgtcgtcggcaacgggaccgagggatgcctgccggccttccctccgcaggtctttacgctgccgcagtacggttacgcgacgctgaaccgcgacaacacagaaaatcccaccgagaggagcagcttcttctgcctagagtactttcccagcaagatgctgagaacgggcaacaactttgagtttacctacaactttgaggaggtgcccttccactccagcttcgctcccagtcagaacctcttcaagctggccaacccgctggtggaccagtacttgtaccgcttcgtgagcacaaataacactggcggagtccagttcaacaagaacctggccgggagatacgccaacacctacaaaaactggttcccggggcccatgggccgaacccagggctggaacctgggctccggggtcaaccgcgccagtgtcagcgccttcgccacgaccaataggatggagctcgagggcgcgagttaccaggtgcccccgcagccgaacggcatgaccaacaacctccagggcagcaacacctatgccctggagaacactatgatcttcaacagccagccggcgaacccgggcaccaccgccacgtacctcgagggcaacatgctcatcaccagcgagagcgagacgcagccggtgaaccgcgtggcgtacaacgtcggcgggcagatggccaccaacaaccagagctccaccactgcccccgcgaccggcacgtacaacctccaggaaatcgtgcccggcagcgtgtggatggagagggacgtgtacctccaaggacccatctgggccaagatcccagagacgggggcgcactttcacccctctccggccatgggcggattcggactcaaacacccaccgcccatgatgctcatcaagaacacgcctgtgcccggaaatatcaccagcttctcggacgtgcccgtcagcagcttcatcacccagtacagcaccgggcaggtcaccgtggagatggagtgggagctcaagaaggaaaactccaagaggtggaacccagagatccagtacacaaacaactacaacgacccccagtttgtggactttgccccggacagcaccggggaatacagaaccaccagacctatcggaacccgataccttacccgacccctttaa

SEQ ID NO: 28 - protein, 588 aa, synthetic construct
TAPTGKRIDDHFPKRKKARTEEDSKPSTSSDAEAGPSGSQQLQIPAQPASSLGADTMSAGGGGPLGDNNQGADGVGNASGDWHCDSTWMGDRVVTKSTRTWVLPSYNNHQYREIKSGSVDGSNANAYFGYSTPWGYFDFNRFHSHWSPREWQRLINNYWGFRPRSLRVKIFNIQVKEVTVQDSTTTIANNLTSTVQVFTDDDYQLPYVVGNGTEGCLPAFPPQVFTLPQYGYATLNRDNTENPTERSSFFCLEYFPSKMLRTGNNFEFTYNFEEVPFHSSFAPSQNLFKLANPLVDQYLYRFVSTNNTGGVQFNKNLAGRYANTYKNWFPGPMGRTQGWNLGSGVNRASVSAFATTNRMELEGASYQVPPQPNGMTNNLQGSNTYALENTMIFNSQPANPGTTATYLEGNMLITSESETQPVNRVAYNVGGQMATNNQSSTTAPATGTYNLQEIVPGSVWMERDVYLQGPIWAKIPETGAHFHPSPAMGGFGLKHPPPMMLIKNTPVPGNITSFSDVPVSSFITQYSTGQVTVEMEWELKKENSKRWNPEIQYTNNYNDPQFVDFAPDSTGEYRTTRPIGTRYLTRPL

SEQ ID NO: 29 - DNA, 1599 bp, synthetic construct
  source 1..1599: mol_type = other DNA
atgtctgcgggaggtggcggcccattgggcgacaataaccaaggtgccgatggagtgggcaatgcctcgggagattggcattgcgattccacgtggatgggggacagagtcgtcaccaagtccacccgaacctgggtgctgcccagctacaacaaccaccagtaccgagagatcaaaagcggctccgtcgacggaagcaacgccaacgcctactttggatacagcaccccctgggggtactttgactttaaccgcttccacagccactggagcccccgagagtggcaaagactcatcaacaactactggggcttcagaccccggtccctcagagtcaaaatcttcaacattcaagtcaaagaggtcacggtgcaggactccaccaccaccatcgccaacaacctcacctccaccgtccaagtgtttacggacgacgactaccagctgccctacgtcgtcggcaacgggaccgagggatgcctgccggccttccctccgcaggtctttacgctgccgcagtacggttacgcgacgctgaaccgcgacaacacagaaaatcccaccgagaggagcagcttcttctgcctagagtactttcccagcaagatgctgagaacgggcaacaactttgagtttacctacaactttgaggaggtgcccttccactccagcttcgctcccagtcagaacctcttcaagctggccaacccgctggtggaccagtacttgtaccgcttcgtgagcacaaataacactggcggagtccagttcaacaagaacctggccgggagatacgccaacacctacaaaaactggttcccggggcccatgggccgaacccagggctggaacctgggctccggggtcaaccgcgccagtgtcagcgccttcgccacgaccaataggatggagctcgagggcgcgagttaccaggtgcccccgcagccgaacggcatgaccaacaacctccagggcagcaacacctatgccctggagaacactatgatcttcaacagccagccggcgaacccgggcaccaccgccacgtacctcgagggcaacatgctcatcaccagcgagagcgagacgcagccggtgaaccgcgtggcgtacaacgtcggcgggcagatggccaccaacaaccagagctccaccactgcccccgcgaccggcacgtacaacctccaggaaatcgtgcccggcagcgtgtggatggagagggacgtgtacctccaaggacccatctgggccaagatcccagagacgggggcgcactttcacccctctccggccatgggcggattcggactcaaacacccaccgcccatgatgctcatcaagaacacgcctgtgcccggaaatatcaccagcttctcggacgtgcccgtcagcagcttcatcacccagtacagcaccgggcaggtcaccgtggagatggagtgggagctcaagaaggaaaactccaagaggtggaacccagagatccagtacacaaacaactacaacgacccccagtttgtggactttgccccggacagcaccggggaatacagaaccaccagacctatcggaacccgataccttacccgacccctttaa

SEQ ID NO: 30 - protein, 532 aa, synthetic construct
MSAGGGGPLGDNNQGADGVGNASGDWHCDSTWMGDRVVTKSTRTWVLPSYNNHQYREIKSGSVDGSNANAYFGYSTPWGYFDFNRFHSHWSPREWQRLINNYWGFRPRSLRVKIFNIQVKEVTVQDSTTTIANNLTSTVQVFTDDDYQLPYVVGNGTEGCLPAFPPQVFTLPQYGYATLNRDNTENPTERSSFFCLEYFPSKMLRTGNNFEFTYNFEEVPFHSSFAPSQNLFKLANPLVDQYLYRFVSTNNTGGVQFNKNLAGRYANTYKNWFPGPMGRTQGWNLGSGVNRASVSAFATTNRMELEGASYQVPPQPNGMTNNLQGSNTYALENTMIFNSQPANPGTTATYLEGNMLITSESETQPVNRVAYNVGGQMATNNQSSTTAPATGTYNLQEIVPGSVWMERDVYLQGPIWAKIPETGAHFHPSPAMGGFGLKHPPPMMLIKNTPVPGNITSFSDVPVSSFITQYSTGQVTVEMEWELKKENSKRWNPEIQYTNNYNDPQFVDFAPDSTGEYRTTRPIGTRYLTRPL

SEQ ID NO: 31 - DNA, 2175 bp, synthetic construct
  source 1..2175: mol_type = other DNA
atggcttttgttgatcaccctccagattggttggaagaagttggtgaaggtcttcgcgagtttttgggccttgaagcgggcccaccgaaaccaaaacccaatcagcagcatcaagatcaagcccgtggtcttgtgctgcctggttataactatctcggacccggaaacggtctcgatcgaggagagcctgtcaacagggcagacgaggtcgcgcgagagcacgacatctcgtacaacgagcagcttgaggcgggagacaacccctacctcaagtacaaccacgcggacgccgagtttcaggagaagctcgccgacgacacatccttcgggggaaacctcggaaaggcagtctttcaggccaagaaaagggttctcgaaccttttggcctggttgaagagggtgctaagacggcccctaccggaaagcggatagacgaccactttccaaaaagaaagaaggctcggaccgaagaggactccaagccttccacctcgtcagacgccgaagctggacccagcggatcccagcagctgcaaatcccagcccaaccagcctcaagtttgggagctgatacaatgtctgcgggaggtggcggcccattgggcgacaataaccaaggtgccgatggagtgggcaatgcctcgggagattggcattgcgattccacgtggatgggggacagagtcgtcaccaagtccacccgaacctgggtgctgcccagctacaacaaccaccagtaccgagagatcaaaagcggctccgtcgacggaagcaacgccaacgcctactttggatacagcaccccctgggggtactttgactttaaccgcttccacagccactggagcccccgagagtggcaaagactcatcaacaactactggggcttcagaccccggtccctcagagtcaaaatcttcaacattcaagtcaaagaggtcacggtgcaggactccaccaccaccatcgccaacaacctcacctccaccgtccaagtgtttacggacgacgactaccagctgccctacgtcgtcggcaacgggaccgagggatgcctgccggccttccctccgcaggtctttacgctgccgcagtacggttacgcgacgctgaaccgcgacaacacagaaaatcccaccgagaggagcagcttcttctgcctagagtactttcccagcaagatgctgagaacgggcaacaactttgagtttacctacaactttgaggaggtgcccttccactccagcttcgctcccagtcagaacctcttcaagctggccaacccgctggtggaccagtacttgtaccgcttcgtgagcacaaataacactggcggagtccagttcaacaagaacctggccgggagatacgccaacacctacaaaaactggttcccggggcccatgggccgaacccagggctggaacctgggctccggggtcaaccgcgccagtgtcagcgccttcgccacgaccaataggatggagctcgagggcgcgagttaccaggtgcccccgcagccgaacggcatgaccaacaacctccagggcagcaacacctatgccctggagaacactatgatcttcaacagccagccggcgaacccgggcaccaccgccacgtacctcgagggcaacatgctcatcaccagcgagagcgagacgcagccggtgaaccgcgtggcgtacaacgtcggcgggcagatggccaccaacaaccagagctccaccactgcccccgcgaccggcacgtacaacctccaggaaatcgtgcccggcagcgtgtggatggagagggacgtgtacctccaaggacccatctgggccaagatcccagagacgggggcgcactttcacccctctccggccatgggcggattcggactcaaacacccaccgcccatgatgctcatcaagaacacgcctgtgcccggaaatatcaccagcttctcggacgtgcccgtcagcagcttcatcacccagtacagcaccgggcaggtcaccgtggagatggagtgggagctcaagaaggaaaactccaagaggtggaacccagagatccagtacacaaacaactacaacgacccccagtttgtggactttgccccggacagcaccggggaatacagaagcaccagacctatcggaacccgataccttacccgacccctttaa

SEQ ID NO: 32 - protein, 724 aa, synthetic construct
MAFVDHPPDWLEEVGEGLREFLGLEAGPPKPKPNQQHQDQARGLVLPGYNYLGPGNGLDRGEPVNRADEVAREHDISYNEQLEAGDNPYLKYNHADAEFQEKLADDTSFGGNLGKAVFQAKKRVLEPFGLVEEGAKTAPTGKRIDDHFPKRKKARTEEDSKPSTSSDAEAGPSGSQQLQIPAQPASSLGADTMSAGGGGPLGDNNQGADGVGNASGDWHCDSTWMGDRVVTKSTRTWVLPSYNNHQYREIKSGSVDGSNANAYFGYSTPWGYFDFNRFHSHWSPREWQRLINNYWGFRPRSLRVKIFNIQVKEVTVQDSTTTIANNLTSTVQVFTDDDYQLPYVVGNGTEGCLPAFPPQVFTLPQYGYATLNRDNTENPTERSSFFCLEYFPSKMLRTGNNFEFTYNFEEVPFHSSFAPSQNLFKLANPLVDQYLYRFVSTNNTGGVQFNKNLAGRYANTYKNWFPGPMGRTQGWNLGSGVNRASVSAFATTNRMELEGASYQVPPQPNGMTNNLQGSNTYALENTMIFNSQPANPGTTATYLEGNMLITSESETQPVNRVAYNVGGQMATNNQSSTTAPATGTYNLQEIVPGSVWMERDVYLQGPIWAKIPETGAHFHPSPAMGGFGLKHPPPMMLIKNTPVPGNITSFSDVPVSSFITQYSTGQVTVEMEWELKKENSKRWNPEIQYTNNYNDPQFVDFAPDSTGEYRSTRPIGTRYLTRPL

SEQ ID NO: 33 - DNA, 1767 bp, synthetic construct
  source 1..1767: mol_type = other DNA
acggcccctaccggaaagcggatagacgaccactttccaaaaagaaagaaggctcggaccgaagaggactccaagccttccacctcgtcagacgccgaagctggacccagcggatcccagcagctgcaaatcccagcccaaccagcctcaagtttgggagctgatacaatgtctgcgggaggtggcggcccattgggcgacaataaccaaggtgccgatggagtgggcaatgcctcgggagattggcattgcgattccacgtggatgggggacagagtcgtcaccaagtccacccgaacctgggtgctgcccagctacaacaaccaccagtaccgagagatcaaaagcggctccgtcgacggaagcaacgccaacgcctactttggatacagcaccccctgggggtactttgactttaaccgcttccacagccactggagcccccgagagtggcaaagactcatcaacaactactggggcttcagaccccggtccctcagagtcaaaatcttcaacattcaagtcaaagaggtcacggtgcaggactccaccaccaccatcgccaacaacctcacctccaccgtccaagtgtttacggacgacgactaccagctgccctacgtcgtcggcaacgggaccgagggatgcctgccggccttccctccgcaggtctttacgctgccgcagtacggttacgcgacgctgaaccgcgacaacacagaaaatcccaccgagaggagcagcttcttctgcctagagtactttcccagcaagatgctgagaacgggcaacaactttgagtttacctacaactttgaggaggtgcccttccactccagcttcgctcccagtcagaacctcttcaagctggccaacccgctggtggaccagtacttgtaccgcttcgtgagcacaaataacactggcggagtccagttcaacaagaacctggccgggagatacgccaacacctacaaaaactggttcccggggcccatgggccgaacccagggctggaacctgggctccggggtcaaccgcgccagtgtcagcgccttcgccacgaccaataggatggagctcgagggcgcgagttaccaggtgcccccgcagccgaacggcatgaccaacaacctccagggcagcaacacctatgccctggagaacactatgatcttcaacagccagccggcgaacccgggcaccaccgccacgtacctcgagggcaacatgctcatcaccagcgagagcgagacgcagccggtgaaccgcgtggcgtacaacgtcggcgggcagatggccaccaacaaccagagctccaccactgcccccgcgaccggcacgtacaacctccaggaaatcgtgcccggcagcgtgtggatggagagggacgtgtacctccaaggacccatctgggccaagatcccagagacgggggcgcactttcacccctctccggccatgggcggattcggactcaaacacccaccgcccatgatgctcatcaagaacacgcctgtgcccggaaatatcaccagcttctcggacgtgcccgtcagcagcttcatcacccagtacagcaccgggcaggtcaccgtggagatggagtgggagctcaagaaggaaaactccaagaggtggaacccagagatccagtacacaaacaactacaacgacccccagtttgtggactttgccccggacagcaccggggaatacagaagcaccagacctatcggaacccgataccttacccgacccctttaa

SEQ ID NO: 34 - protein, 588 aa, synthetic construct
TAPTGKRIDDHFPKRKKARTEEDSKPSTSSDAEAGPSGSQQLQIPAQPASSLGADTMSAGGGGPLGDNNQGADGVGNASGDWHCDSTWMGDRVVTKSTRTWVLPSYNNHQYREIKSGSVDGSNANAYFGYSTPWGYFDFNRFHSHWSPREWQRLINNYWGFRPRSLRVKIFNIQVKEVTVQDSTTTIANNLTSTVQVFTDDDYQLPYVVGNGTEGCLPAFPPQVFTLPQYGYATLNRDNTENPTERSSFFCLEYFPSKMLRTGNNFEFTYNFEEVPFHSSFAPSQNLFKLANPLVDQYLYRFVSTNNTGGVQFNKNLAGRYANTYKNWFPGPMGRTQGWNLGSGVNRASVSAFATTNRMELEGASYQVPPQPNGMTNNLQGSNTYALENTMIFNSQPANPGTTATYLEGNMLITSESETQPVNRVAYNVGGQMATNNQSSTTAPATGTYNLQEIVPGSVWMERDVYLQGPIWAKIPETGAHFHPSPAMGGFGLKHPPPMMLIKNTPVPGNITSFSDVPVSSFITQYSTGQVTVEMEWELKKENSKRWNPEIQYTNNYNDPQFVDFAPDSTGEYRSTRPIGTRYLTRPL

SEQ ID NO: 35 - DNA, 1599 bp, synthetic construct
  source 1..1599: mol_type = other DNA
atgtctgcgggaggtggcggcccattgggcgacaataaccaaggtgccgatggagtgggcaatgcctcgggagattggcattgcgattccacgtggatgggggacagagtcgtcaccaagtccacccgaacctgggtgctgcccagctacaacaaccaccagtaccgagagatcaaaagcggctccgtcgacggaagcaacgccaacgcctactttggatacagcaccccctgggggtactttgactttaaccgcttccacagccactggagcccccgagagtggcaaagactcatcaacaactactggggcttcagaccccggtccctcagagtcaaaatcttcaacattcaagtcaaagaggtcacggtgcaggactccaccaccaccatcgccaacaacctcacctccaccgtccaagtgtttacggacgacgactaccagctgccctacgtcgtcggcaacgggaccgagggatgcctgccggccttccctccgcaggtctttacgctgccgcagtacggttacgcgacgctgaaccgcgacaacacagaaaatcccaccgagaggagcagcttcttctgcctagagtactttcccagcaagatgctgagaacgggcaacaactttgagtttacctacaactttgaggaggtgcccttccactccagcttcgctcccagtcagaacctcttcaagctggccaacccgctggtggaccagtacttgtaccgcttcgtgagcacaaataacactggcggagtccagttcaacaagaacctggccgggagatacgccaacacctacaaaaactggttcccggggcccatgggccgaacccagggctggaacctgggctccggggtcaaccgcgccagtgtcagcgccttcgccacgaccaataggatggagctcgagggcgcgagttaccaggtgcccccgcagccgaacggcatgaccaacaacctccagggcagcaacacctatgccctggagaacactatgatcttcaacagccagccggcgaacccgggcaccaccgccacgtacctcgagggcaacatgctcatcaccagcgagagcgagacgcagccggtgaaccgcgtggcgtacaacgtcggcgggcagatggccaccaacaaccagagctccaccactgcccccgcgaccggcacgtacaacctccaggaaatcgtgcccggcagcgtgtggatggagagggacgtgtacctccaaggacccatctgggccaagatcccagagacgggggcgcactttcacccctctccggccatgggcggattcggactcaaacacccaccgcccatgatgctcatcaagaacacgcctgtgcccggaaatatcaccagcttctcggacgtgcccgtcagcagcttcatcacccagtacagcaccgggcaggtcaccgtggagatggagtgggagctcaagaaggaaaactccaagaggtggaacccagagatccagtacacaaacaactacaacgacccccagtttgtggactttgccccggacagcaccggggaatacagaagcaccagacctatcggaacccgataccttacccgacccctttaa

SEQ ID NO: 36 - protein, 532 aa, synthetic construct
MSAGGGGPLGDNNQGADGVGNASGDWHCDSTWMGDRVVTKSTRTWVLPSYNNHQYREIKSGSVDGSNANAYFGYSTPWGYFDFNRFHSHWSPREWQRLINNYWGFRPRSLRVKIFNIQVKEVTVQDSTTTIANNLTSTVQVFTDDDYQLPYVVGNGTEGCLPAFPPQVFTLPQYGYATLNRDNTENPTERSSFFCLEYFPSKMLRTGNNFEFTYNFEEVPFHSSFAPSQNLFKLANPLVDQYLYRFVSTNNTGGVQFNKNLAGRYANTYKNWFPGPMGRTQGWNLGSGVNRASVSAFATTNRMELEGASYQVPPQPNGMTNNLQGSNTYALENTMIFNSQPANPGTTATYLEGNMLITSESETQPVNRVAYNVGGQMATNNQSSTTAPATGTYNLQEIVPGSVWMERDVYLQGPIWAKIPETGAHFHPSPAMGGFGLKHPPPMMLIKNTPVPGNITSFSDVPVSSFITQYSTGQVTVEMEWELKKENSKRWNPEIQYTNNYNDPQFVDFAPDSTGEYRSTRPIGTRYLTRPL

SEQ ID NO: 37 - DNA, 2175 bp, synthetic construct
  source 1..2175: mol_type = other DNA
atgtcttttgttgatcaccctccagattggttggaagaagttggtgaaggtcttcgcgagtttttgggccttgaagcgggcccaccgaaaccaaaacccaatcagcagcatcaagatcaagcccgtggtcttgtgctgcctggttataactatctcggacccggaaacggtctcgatcgaggagagcctgtcaacagggcagacgaggtcgcgcgagagcacgacatctcgtacaacgagcagcttgaggcgggagacaacccctacctcaagtacaaccacgcggacgccgagtttcaggagaagctcgccgacgacacatccttcgggggaaacctcggaaaggcagtctttcaggccaagaaaagggttctcgaaccttttggcctggttgaagagggtgctaagacggcccctaccggaaagcggatagacgaccactttccaaaaagaaagaaggctcggaccgaagaggactccaagccttccacctcgtcagacgccgaagctggacccagcggatcccagcagctgcaaatcccagcccaaccagcctcaagtttgggagctgatacaatgtctgcgggaggtggcggcccattgggcgacaataaccaaggtgccgatggagtgggcaatgcctcgggagattggcattgcgattccacgtggatgggggacagagtcgtcaccaagtccacccgaacctgggtgctgcccagctacaacaaccaccagtaccgagagatcaaaagcggctccgtcgacggaagcaacgccaacgcctactttggatacagcaccccctgggggtactttgactttaaccgcttccacagccactggagcccccgagactggcaaagactcatcaacaactactggggcttcagaccccggtccctcagagtcaaaatcttcaacattcaagtcaaagaggtcacggtgcaggactccaccaccaccatcgccaacaacctcacctccaccgtccaagtgtttacggacgacgactaccagtacccctacgtcgtcggcaacgggaccgagggatgcctgccggccttccctccgcaggtctttacgctgccgcagtacggttacgcgacgctgaaccgcgacaacacagaaaatcccaccgagaggagcagcttcttctgcctagagtactttcccagcaagatgctgagaacgggcaacaactttgagtttacctacaactttgaggaggtgcccttccactccagcttcgctcccagtcagaacctcttcaagctggccaacccgctggtggaccagtacttgtaccgcttcgtgagcacaaataacactggcggagtccagttcaacaagaacctggccgggagatacgccaacacctacaaaaactggttcccggggcccatgggccgaacccagggctggaacctgggctccggggtcaaccgcgccagtgtcagcgccttcgccacgaccaataggatggagctcgagggcgcgagttaccaggtgcccccgcagccgaacggcatgaccaacaacctccagggcagcaacacctatgccctggagaacactatgatcttcaacagccagccggcgaacccgggcaccaccgccacgtacctcgagggcaacatgctcatcaccagcgagagcgagacgcagccggtgaaccgcgtggcgtacaacgtcggcgggcagatggccaccaacaaccagagctccaccactgcccccgcgaccggcacgtacaacctccaggaaatcgtgcccggcagcgtgtggatggagagggacgtgtacctccaaggacccatctgggccaagatcccagagacgggggcgcactttcacccctctccggccatgggcggattcggactcaaacacccaccgcccatgatgctcatcaagaacacgcctgtgcccggaaatatcaccagcttctcggacgtgcccgtcagcagcttcatcacccagtacagcaccgggcaggtcaccgtggagatggagtgggagctcaagaaggaaaactccaagaggtggaacccagagatccagtacacaaacaactacaacgacccccagtttgtggactttgccccggacagcaccggggaatacagaaccaccagacctatcggaacccgataccttacccgacccctttaa

SEQ ID NO: 38 - protein, 724 aa, synthetic construct
MSFVDHPPDWLEEVGEGLREFLGLEAGPPKPKPNQQHQDQARGLVLPGYNYLGPGNGLDRGEPVNRADEVAREHDISYNEQLEAGDNPYLKYNHADAEFQEKLADDTSFGGNLGKAVFQAKKRVLEPFGLVEEGAKTAPTGKRIDDHFPKRKKARTEEDSKPSTSSDAEAGPSGSQQLQIPAQPASSLGADTMSAGGGGPLGDNNQGADGVGNASGDWHCDSTWMGDRVVTKSTRTWVLPSYNNHQYREIKSGSVDGSNANAYFGYSTPWGYFDFNRFHSHWSPRDWQRLINNYWGFRPRSLRVKIFNIQVKEVTVQDSTTTIANNLTSTVQVFTDDDYQYPYVVGNGTEGCLPAFPPQVFTLPQYGYATLNRDNTENPTERSSFFCLEYFPSKMLRTGNNFEFTYNFEEVPFHSSFAPSQNLFKLANPLVDQYLYRFVSTNNTGGVQFNKNLAGRYANTYKNWFPGPMGRTQGWNLGSGVNRASVSAFATTNRMELEGASYQVPPQPNGMTNNLQGSNTYALENTMIFNSQPANPGTTATYLEGNMLITSESETQPVNRVAYNVGGQMATNNQSSTTAPATGTYNLQEIVPGSVWMERDVYLQGPIWAKIPETGAHFHPSPAMGGFGLKHPPPMMLIKNTPVPGNITSFSDVPVSSFITQYSTGQVTVEMEWELKKENSKRWNPEIQYTNNYNDPQFVDFAPDSTGEYRTTRPIGTRYLTRPL

SEQ ID NO: 39 - DNA, 1767 bp, synthetic construct
  source 1..1767: mol_type = other DNA
acggcccctaccggaaagcggatagacgaccactttccaaaaagaaagaaggctcggaccgaagaggactccaagccttccacctcgtcagacgccgaagctggacccagcggatcccagcagctgcaaatcccagcccaaccagcctcaagtttgggagctgatacaatgtctgcgggaggtggcggcccattgggcgacaataaccaaggtgccgatggagtgggcaatgcctcgggagattggcattgcgattccacgtggatgggggacagagtcgtcaccaagtccacccgaacctgggtgctgcccagctacaacaaccaccagtaccgagagatcaaaagcggctccgtcgacggaagcaacgccaacgcctactttggatacagcaccccctgggggtactttgactttaaccgcttccacagccactggagcccccgagactggcaaagactcatcaacaactactggggcttcagaccccggtccctcagagtcaaaatcttcaacattcaagtcaaagaggtcacggtgcaggactccaccaccaccatcgccaacaacctcacctccaccgtccaagtgtttacggacgacgactaccagtatccctacgtcgtcggcaacgggaccgagggatgcctgccggccttccctccgcaggtctttacgctgccgcagtacggttacgcgacgctgaaccgcgacaacacagaaaatcccaccgagaggagcagcttcttctgcctagagtactttcccagcaagatgctgagaacgggcaacaactttgagtttacctacaactttgaggaggtgcccttccactccagcttcgctcccagtcagaacctcttcaagctggccaacccgctggtggaccagtacttgtaccgcttcgtgagcacaaataacactggcggagtccagttcaacaagaacctggccgggagatacgccaacacctacaaaaactggttcccggggcccatgggccgaacccagggctggaacctgggctccggggtcaaccgcgccagtgtcagcgccttcgccacgaccaataggatggagctcgagggcgcgagttaccaggtgcccccgcagccgaacggcatgaccaacaacctccagggcagcaacacctatgccctggagaacactatgatcttcaacagccagccggcgaacccgggcaccaccgccacgtacctcgagggcaacatgctcatcaccagcgagagcgagacgcagccggtgaaccgcgtggcgtacaacgtcggcgggcagatggccaccaacaaccagagctccaccactgcccccgcgaccggcacgtacaacctccaggaaatcgtgcccggcagcgtgtggatggagagggacgtgtacctccaaggacccatctgggccaagatcccagagacgggggcgcactttcacccctctccggccatgggcggattcggactcaaacacccaccgcccatgatgctcatcaagaacacgcctgtgcccggaaatatcaccagcttctcggacgtgcccgtcagcagcttcatcacccagtacagcaccgggcaggtcaccgtggagatggagtgggagctcaagaaggaaaactccaagaggtggaacccagagatccagtacacaaacaactacaacgacccccagtttgtggactttgccccggacagcaccggggaatacagaaccaccagacctatcggaacccgataccttacccgacccctttaa

SEQ ID NO: 40 - protein, 588 aa, synthetic construct
TAPTGKRIDDHFPKRKKARTEEDSKPSTSSDAEAGPSGSQQLQIPAQPASSLGADTMSAGGGGPLGDNNQGADGVGNASGDWHCDSTWMGDRVVTKSTRTWVLPSYNNHQYREIKSGSVDGSNANAYFGYSTPWGYFDFNRFHSHWSPRDWQRLINNYWGFRPRSLRVKIFNIQVKEVTVQDSTTTIANNLTSTVQVFTDDDYQYPYVVGNGTEGCLPAFPPQVFTLPQYGYATLNRDNTENPTERSSFFCLEYFPSKMLRTGNNFEFTYNFEEVPFHSSFAPSQNLFKLANPLVDQYLYRFVSTNNTGGVQFNKNLAGRYANTYKNWFPGPMGRTQGWNLGSGVNRASVSAFATTNRMELEGASYQVPPQPNGMTNNLQGSNTYALENTMIFNSQPANPGTTATYLEGNMLITSESETQPVNRVAYNVGGQMATNNQSSTTAPATGTYNLQEIVPGSVWMERDVYLQGPIWAKIPETGAHFHPSPAMGGFGLKHPPPMMLIKNTPVPGNITSFSDVPVSSFITQYSTGQVTVEMEWELKKENSKRWNPEIQYTNNYNDPQFVDFAPDSTGEYRTTRPIGTRYLTRPL

SEQ ID NO: 41 - DNA, 1599 bp, synthetic construct
  source 1..1599: mol_type = other DNA
atgtctgcgggaggtggcggcccattgggcgacaataaccaaggtgccgatggagtgggcaatgcctcgggagattggcattgcgattccacgtggatgggggacagagtcgtcaccaagtccacccgaacctgggtgctgcccagctacaacaaccaccagtaccgagagatcaaaagcggctccgtcgacggaagcaacgccaacgcctactttggatacagcaccccctgggggtactttgactttaaccgcttccacagccactggagcccccgagactggcaaagactcatcaacaactactggggcttcagaccccggtccctcagagtcaaaatcttcaacattcaagtcaaagaggtcacggtgcaggactccaccaccaccatcgccaacaacctcacctccaccgtccaagtgtttacggacgacgactaccagtatccctacgtcgtcggcaacgggaccgagggatgcctgccggccttccctccgcaggtctttacgctgccgcagtacggttacgcgacgctgaaccgcgacaacacagaaaatcccaccgagaggagcagcttcttctgcctagagtactttcccagcaagatgctgagaacgggcaacaactttgagtttacctacaactttgaggaggtgcccttccactccagcttcgctcccagtcagaacctcttcaagctggccaacccgctggtggaccagtacttgtaccgcttcgtgagcacaaataacactggcggagtccagttcaacaagaacctggccgggagatacgccaacacctacaaaaactggttcccggggcccatgggccgaacccagggctggaacctgggctccggggtcaaccgcgccagtgtcagcgccttcgccacgaccaataggatggagctcgagggcgcgagttaccaggtgcccccgcagccgaacggcatgaccaacaacctccagggcagcaacacctatgccctggagaacactatgatcttcaacagccagccggcgaacccgggcaccaccgccacgtacctcgagggcaacatgctcatcaccagcgagagcgagacgcagccggtgaaccgcgtggcgtacaacgtcggcgggcagatggccaccaacaaccagagctccaccactgcccccgcgaccggcacgtacaacctccaggaaatcgtgcccggcagcgtgtggatggagagggacgtgtacctccaaggacccatctgggccaagatcccagagacgggggcgcactttcacccctctccggccatgggcggattcggactcaaacacccaccgcccatgatgctcatcaagaacacgcctgtgcccggaaatatcaccagcttctcggacgtgcccgtcagcagcttcatcacccagtacagcaccgggcaggtcaccgtggagatggagtgggagctcaagaaggaaaactccaagaggtggaacccagagatccagtacacaaacaactacaacgacccccagtttgtggactttgccccggacagcaccggggaatacagaaccaccagacctatcggaacccgataccttacccgacccctttaa

SEQ ID NO: 42 - protein, 532 aa, synthetic construct
MSAGGGGPLGDNNQGADGVGNASGDWHCDSTWMGDRVVTKSTRTWVLPSYNNHQYREIKSGSVDGSNANAYFGYSTPWGYFDFNRFHSHWSPRDWQRLINNYWGFRPRSLRVKIFNIQVKEVTVQDSTTTIANNLTSTVQVFTDDDYQYPYVVGNGTEGCLPAFPPQVFTLPQYGYATLNRDNTENPTERSSFFCLEYFPSKMLRTGNNFEFTYNFEEVPFHSSFAPSQNLFKLANPLVDQYLYRFVSTNNTGGVQFNKNLAGRYANTYKNWFPGPMGRTQGWNLGSGVNRASVSAFATTNRMELEGASYQVPPQPNGMTNNLQGSNTYALENTMIFNSQPANPGTTATYLEGNMLITSESETQPVNRVAYNVGGQMATNNQSSTTAPATGTYNLQEIVPGSVWMERDVYLQGPIWAKIPETGAHFHPSPAMGGFGLKHPPPMMLIKNTPVPGNITSFSDVPVSSFITQYSTGQVTVEMEWELKKENSKRWNPEIQYTNNYNDPQFVDFAPDSTGEYRTTRPIGTRYLTRPL

SEQ ID NO: 43 - DNA, 2175 bp, synthetic construct
  source 1..2175: mol_type = other DNA
atggcttttgttgatcaccctccagattggttggaagaagttggtgaaggtcttcgcgagtttttgggccttgaagcgggcccaccgaaaccaaaacccaatcagcagcatcaagatcaagcccgtggtcttgtgctgcctggttataactatctcggacccggaaacggtctcgatcgaggagagcctgtcaacagggcagacgaggtcgcgcgagagcacgacatctcgtacaacgagcagcttgaggcgggagacaacccctacctcaagtacaaccacgcggacgccgagtttcaggagaagctcgccgacgacacatccttcgggggaaacctcggaaaggcagtctttcaggccaagaaaagggttctcgaaccttttggcctggttgaagagggtgctaagacggcccctaccggaaagcggatagacgaccactttccaaaaagaaagaaggctcggaccgaagaggactccaagccttccacctcgtcagacgccgaagctggacccagcggatcccagcagctgcaaatcccagcccaaccagcctcaagtttgggagctgatacaatgtctgcgggaggtggcggcccattgggcgacaataaccaaggtgccgatggagtgggcaatgcctcgggagattggcattgcgattccacgtggatgggggacagagtcgtcaccaagtccacccgaacctgggtgctgcccagctacaacaaccaccagtaccgagagatcaaaagcggctccgtcgacggaagcaacgccaacgcctactttggatacagcaccccctgggggtactttgactttaaccgcttccacagccactggagcccccgagactggcaaagactcatcaacaactactggggcttcagaccccggtccctcagagtcaaaatcttcaacattcaagtcaaagaggtcacggtgcaggactccaccaccaccatcgccaacaacctcacctccaccgtccaagtgtttacggacgacgactaccagtatccctacgtcgtcggcaacgggaccgagggatgcctgccggccttccctccgcaggtctttacgctgccgcagtacggttacgcgacgctgaaccgcgacaacacagaaaatcccaccgagaggagcagcttcttctgcctagagtactttcccagcaagatgctgagaacgggcaacaactttgagtttacctacaactttgaggaggtgcccttccactccagcttcgctcccagtcagaacctcttcaagctggccaacccgctggtggaccagtacttgtaccgcttcgtgagcacaaataacactggcggagtccagttcaacaagaacctggccgggagatacgccaacacctacaaaaactggttcccggggcccatgggccgaacccagggctggaacctgggctccggggtcaaccgcgccagtgtcagcgccttcgccacgaccaataggatggagctcgagggcgcgagttaccaggtgcccccgcagccgaacggcatgaccaacaacctccagggcagcaacacctatgccctggagaacactatgatcttcaacagccagccggcgaacccgggcaccaccgccacgtacctcgagggcaacatgctcatcaccagcgagagcgagacgcagccggtgaaccgcgtggcgtacaacgtcggcgggcagatggccaccaacaaccagagctccaccactgcccccgcgaccggcacgtacaacctccaggaaatcgtgcccggcagcgtgtggatggagagggacgtgtacctccaaggacccatctgggccaagatcccagagacgggggcgcactttcacccctctccggccatgggcggattcggactcaaacacccaccgcccatgatgctcatcaagaacacgcctgtgcccggaaatatcaccagcttctcggacgtgcccgtcagcagcttcatcacccagtacagcaccgggcaggtcaccgtggagatggagtgggagctcaagaaggaaaactccaagaggtggaacccagagatccagtacacaaacaactacaacgacccccagtttgtggactttgccccggacagcaccggggaatacagaagcaccagacctatcggaacccgataccttacccgacccctttaa

SEQ ID NO: 44 - protein, 724 aa, synthetic construct
MAFVDHPPDWLEEVGEGLREFLGLEAGPPKPKPNQQHQDQARGLVLPGYNYLGPGNGLDRGEPVNRADEVAREHDISYNEQLEAGDNPYLKYNHADAEFQEKLADDTSFGGNLGKAVFQAKKRVLEPFGLVEEGAKTAPTGKRIDDHFPKRKKARTEEDSKPSTSSDAEAGPSGSQQLQIPAQPASSLGADTMSAGGGGPLGDNNQGADGVGNASGDWHCDSTWMGDRVVTKSTRTWVLPSYNNHQYREIKSGSVDGSNANAYFGYSTPWGYFDFNRFHSHWSPRDWQRLINNYWGFRPRSLRVKIFNIQVKEVTVQDSTTTIANNLTSTVQVFTDDDYQYPYVVGNGTEGCLPAFPPQVFTLPQYGYATLNRDNTENPTERSSFFCLEYFPSKMLRTGNNFEFTYNFEEVPFHSSFAPSQNLFKLANPLVDQYLYRFVSTNNTGGVQFNKNLAGRYANTYKNWFPGPMGRTQGWNLGSGVNRASVSAFATTNRMELEGASYQVPPQPNGMTNNLQGSNTYALENTMIFNSQPANPGTTATYLEGNMLITSESETQPVNRVAYNVGGQMATNNQSSTTAPATGTYNLQEIVPGSVWMERDVYLQGPIWAKIPETGAHFHPSPAMGGFGLKHPPPMMLIKNTPVPGNITSFSDVPVSSFITQYSTGQVTVEMEWELKKENSKRWNPEIQYTNNYNDPQFVDFAPDSTGEYRSTRPIGTRYLTRPL

SEQ ID NO: 45 - DNA, 1767 bp, synthetic construct
  source 1..1767: mol_type = other DNA
acggcccctaccggaaagcggatagacgaccactttccaaaaagaaagaaggctcggaccgaagaggactccaagccttccacctcgtcagacgccgaagctggacccagcggatcccagcagctgcaaatcccagcccaaccagcctcaagtttgggagctgatacaatgtctgcgggaggtggcggcccattgggcgacaataaccaaggtgccgatggagtgggcaatgcctcgggagattggcattgcgattccacgtggatgggggacagagtcgtcaccaagtccacccgaacctgggtgctgcccagctacaacaaccaccagtaccgagagatcaaaagcggctccgtcgacggaagcaacgccaacgcctactttggatacagcaccccctgggggtactttgactttaaccgcttccacagccactggagcccccgagactggcaaagactcatcaacaactactggggcttcagaccccggtccctcagagtcaaaatcttcaacattcaagtcaaagaggtcacggtgcaggactccaccaccaccatcgccaacaacctcacctccaccgtccaagtgtttacggacgacgactaccagtatccctacgtcgtcggcaacgggaccgagggatgcctgccggccttccctccgcaggtctttacgctgccgcagtacggttacgcgacgctgaaccgcgacaacacagaaaatcccaccgagaggagcagcttcttctgcctagagtactttcccagcaagatgctgagaacgggcaacaactttgagtttacctacaactttgaggaggtgcccttccactccagcttcgctcccagtcagaacctcttcaagctggccaacccgctggtggaccagtacttgtaccgcttcgtgagcacaaataacactggcggagtccagttcaacaagaacctggccgggagatacgccaacacctacaaaaactggttcccggggcccatgggccgaacccagggctggaacctgggctccggggtcaaccgcgccagtgtcagcgccttcgccacgaccaataggatggagctcgagggcgcgagttaccaggtgcccccgcagccgaacggcatgaccaacaacctccagggcagcaacacctatgccctggagaacactatgatcttcaacagccagccggcgaacccgggcaccaccgccacgtacctcgagggcaacatgctcatcaccagcgagagcgagacgcagccggtgaaccgcgtggcgtacaacgtcggcgggcagatggccaccaacaaccagagctccaccactgcccccgcgaccggcacgtacaacctccaggaaatcgtgcccggcagcgtgtggatggagagggacgtgtacctccaaggacccatctgggccaagatcccagagacgggggcgcactttcacccctctccggccatgggcggattcggactcaaacacccaccgcccatgatgctcatcaagaacacgcctgtgcccggaaatatcaccagcttctcggacgtgcccgtcagcagcttcatcacccagtacagcaccgggcaggtcaccgtggagatggagtgggagctcaagaaggaaaactccaagaggtggaacccagagatccagtacacaaacaactacaacgacccccagtttgtggactttgccccggacagcaccggggaatacagaagcaccagacctatcggaacccgataccttacccgacccctttaa

SEQ ID NO: 46 - protein, 588 aa, synthetic construct
TAPTGKRIDDHFPKRKKARTEEDSKPSTSSDAEAGPSGSQQLQIPAQPASSLGADTMSAGGGGPLGDNNQGADGVGNASGDWHCDSTWMGDRVVTKSTRTWVLPSYNNHQYREIKSGSVDGSNANAYFGYSTPWGYFDFNRFHSHWSPRDWQRLINNYWGFRPRSLRVKIFNIQVKEVTVQDSTTTIANNLTSTVQVFTDDDYQYPYVVGNGTEGCLPAFPPQVFTLPQYGYATLNRDNTENPTERSSFFCLEYFPSKMLRTGNNFEFTYNFEEVPFHSSFAPSQNLFKLANPLVDQYLYRFVSTNNTGGVQFNKNLAGRYANTYKNWFPGPMGRTQGWNLGSGVNRASVSAFATTNRMELEGASYQVPPQPNGMTNNLQGSNTYALENTMIFNSQPANPGTTATYLEGNMLITSESETQPVNRVAYNVGGQMATNNQSSTTAPATGTYNLQEIVPGSVWMERDVYLQGPIWAKIPETGAHFHPSPAMGGFGLKHPPPMMLIKNTPVPGNITSFSDVPVSSFITQYSTGQVTVEMEWELKKENSKRWNPEIQYTNNYNDPQFVDFAPDSTGEYRSTRPIGTRYLTRPL

SEQ ID NO: 47 - DNA, 1599 bp, synthetic construct
  source 1..1599: mol_type = other DNA
atgtctgcgggaggtggcggcccattgggcgacaataaccaaggtgccgatggagtgggcaatgcctcgggagattggcattgcgattccacgtggatgggggacagagtcgtcaccaagtccacccgaacctgggtgctgcccagctacaacaaccaccagtaccgagagatcaaaagcggctccgtcgacggaagcaacgccaacgcctactttggatacagcaccccctgggggtactttgactttaaccgcttccacagccactggagcccccgagactggcaaagactcatcaacaactactggggcttcagaccccggtccctcagagtcaaaatcttcaacattcaagtcaaagaggtcacggtgcaggactccaccaccaccatcgccaacaacctcacctccaccgtccaagtgtttacggacgacgactaccagtatccctacgtcgtcggcaacgggaccgagggatgcctgccggccttccctccgcaggtctttacgctgccgcagtacggttacgcgacgctgaaccgcgacaacacagaaaatcccaccgagaggagcagcttcttctgcctagagtactttcccagcaagatgctgagaacgggcaacaactttgagtttacctacaactttgaggaggtgcccttccactccagcttcgctcccagtcagaacctcttcaagctggccaacccgctggtggaccagtacttgtaccgcttcgtgagcacaaataacactggcggagtccagttcaacaagaacctggccgggagatacgccaacacctacaaaaactggttcccggggcccatgggccgaacccagggctggaacctgggctccggggtcaaccgcgccagtgtcagcgccttcgccacgaccaataggatggagctcgagggcgcgagttaccaggtgcccccgcagccgaacggcatgaccaacaacctccagggcagcaacacctatgccctggagaacactatgatcttcaacagccagccggcgaacccgggcaccaccgccacgtacctcgagggcaacatgctcatcaccagcgagagcgagacgcagccggtgaaccgcgtggcgtacaacgtcggcgggcagatggccaccaacaaccagagctccaccactgcccccgcgaccggcacgtacaacctccaggaaatcgtgcccggcagcgtgtggatggagagggacgtgtacctccaaggacccatctgggccaagatcccagagacgggggcgcactttcacccctctccggccatgggcggattcggactcaaacacccaccgcccatgatgctcatcaagaacacgcctgtgcccggaaatatcaccagcttctcggacgtgcccgtcagcagcttcatcacccagtacagcaccgggcaggtcaccgtggagatggagtgggagctcaagaaggaaaactccaagaggtggaacccagagatccagtacacaaacaactacaacgacccccagtttgtggactttgccccggacagcaccggggaatacagaagcaccagacctatcggaacccgataccttacccgacccctttaa

SEQ ID NO: 48 - protein, 532 aa, synthetic construct
MSAGGGGPLGDNNQGADGVGNASGDWHCDSTWMGDRVVTKSTRTWVLPSYNNHQYREIKSGSVDGSNANAYFGYSTPWGYFDFNRFHSHWSPRDWQRLINNYWGFRPRSLRVKIFNIQVKEVTVQDSTTTIANNLTSTVQVFTDDDYQYPYVVGNGTEGCLPAFPPQVFTLPQYGYATLNRDNTENPTERSSFFCLEYFPSKMLRTGNNFEFTYNFEEVPFHSSFAPSQNLFKLANPLVDQYLYRFVSTNNTGGVQFNKNLAGRYANTYKNWFPGPMGRTQGWNLGSGVNRASVSAFATTNRMELEGASYQVPPQPNGMTNNLQGSNTYALENTMIFNSQPANPGTTATYLEGNMLITSESETQPVNRVAYNVGGQMATNNQSSTTAPATGTYNLQEIVPGSVWMERDVYLQGPIWAKIPETGAHFHPSPAMGGFGLKHPPPMMLIKNTPVPGNITSFSDVPVSSFITQYSTGQVTVEMEWELKKENSKRWNPEIQYTNNYNDPQFVDFAPDSTGEYRSTRPIGTRYLTRPL

SEQ ID NO: 49 - DNA, 2175 bp, synthetic construct
  source 1..2175: mol_type = other DNA
atgtcttttgttgatcaccctccagattggttggaagaagttggtgaaggtcttcgcgagtttttgggccttgaagcgggcccaccgaaaccaaaacccaatcagcagcatcaagatcaagcccgtggtcttgtgctgcctggttataactatctcggacccggaaacggtctcgatcgaggagagcctgtcaacagggcagacgaggtcgcgcgagagcacgacatctcgtacaacgagcagcttgaggcgggagacaacccctacctcaagtacaaccacgcggacgccgagtttcaggagaagctcgccgacgacacatccttcgggggaaacctcggaaaggcagtctttcaggccaagaaaagggttctcgaaccttttggcctggttgaagagggtgctaagacggcccctaccggaaagcggatagacgaccactttccaaaaagaaagaaggctcggaccgaagaggactccaagccttccacctcgtcagacgccgaagctggacccagcggatcccagcagctgcaaatcccagcccaaccagcctcaagtttgggagctgatacaatgtctgcgggaggtggcggcccattgggcgacaataaccaaggtgccgatggagtgggcaatgcctcgggagattggcattgcgattccacgtggatgggggacagagtcgtcaccaagtccacccgaacctgggtgctgcccagctacaacaaccaccagtaccgagagatcaaaagcggctccgtcgacggaagcaacgccaacgcctactttggatacagcaccccctgggggtactttgactttaaccgcttccacagccactggagcccccgagactggcaaagactcatcaacaactactggggcttcagaccccggtccctcagagtcaaaatcttcaacattcaagtcaaagaggtcacggtgcaggactccaccaccaccatcgccaacaacctcacctccaccgtccaagtgtttacggacgacgactaccagctgccctacgtcgtcggcaacgggaccgagggatgcctgccggccttccctccgcaggtctttacgctgccgcagtacggttacgcgacgctgaaccgcgacaacacagaaaatcccaccgagaggagcagcttcttcgtcctagagtactttcccagcaagatgctgagaacgggcaacaactttgagtttacctacaactttgaggaggtgcccttccactccagcttcgctcccagtcagaacctcttcaagctggccaacccgctggtggaccagtacttgtaccgcttcgtgagcacaaataacactggcggagtccagttcaacaagaacctggccgggagatacgccaacacctacaaaaactggttcccggggcccatgggccgaacccagggctggaacctgggctccggggtcaaccgcgccagtgtcagcgccttcgccacgaccaataggatggagctcgagggcgcgagttaccaggtgcccccgcagccgaacggcatgaccaacaacctccagggcagcaacacctatgccctggagaacactatgatcttcaacagccagccggcgaacccgggcaccaccgccacgtacctcgagggcaacatgctcatcaccagcgagagcgagacgcagccggtgaaccgcgtggcgtacaacgtcggcgggcagatggccaccaacaaccagagctccaccactgcccccgcgaccggcacgtacaacctccaggaaatcgtgcccggcagcgtgtggatggagagggacgtgtacctccaaggacccatctgggccaagatcccagagacgggggcgcactttcacccctctccggccatgggcggattcggactcaaacacccaccgcccatgatgctcatcaagaacacgcctgtgcccggaaatatcaccagcttctcggacgtgcccgtcagcagcttcatcacccagtacagcaccgggcaggtcaccgtggagatggagtgggagctcaagaaggaaaactccaagaggtggaacccagagatccagtacacaaacaactacaacgacccccagtttgtggactttgccccggacagcaccggggaatacagaaccaccagacctatcggaacccgataccttacccgacccctttaa

SEQ ID NO: 50 - protein, 724 aa, synthetic construct
MSFVDHPPDWLEEVGEGLREFLGLEAGPPKPKPNQQHQDQARGLVLPGYNYLGPGNGLDRGEPVNRADEVAREHDISYNEQLEAGDNPYLKYNHADAEFQEKLADDTSFGGNLGKAVFQAKKRVLEPFGLVEEGAKTAPTGKRIDDHFPKRKKARTEEDSKPSTSSDAEAGPSGSQQLQIPAQPASSLGADTMSAGGGGPLGDNNQGADGVGNASGDWHCDSTWMGDRVVTKSTRTWVLPSYNNHQYREIKSGSVDGSNANAYFGYSTPWGYFDFNRFHSHWSPRDWQRLINNYWGFRPRSLRVKIFNIQVKEVTVQDSTTTIANNLTSTVQVFTDDDYQLPYVVGNGTEGCLPAFPPQVFTLPQYGYATLNRDNTENPTERSSFFVLEYFPSKMLRTGNNFEFTYNFEEVPFHSSFAPSQNLFKLANPLVDQYLYRFVSTNNTGGVQFNKNLAGRYANTYKNWFPGPMGRTQGWNLGSGVNRASVSAFATTNRMELEGASYQVPPQPNGMTNNLQGSNTYALENTMIFNSQPANPGTTATYLEGNMLITSESETQPVNRVAYNVGGQMATNNQSSTTAPATGTYNLQEIVPGSVWMERDVYLQGPIWAKIPETGAHFHPSPAMGGFGLKHPPPMMLIKNTPVPGNITSFSDVPVSSFITQYSTGQVTVEMEWELKKENSKRWNPEIQYTNNYNDPQFVDFAPDSTGEYRTTRPIGTRYLTRPL

SEQ ID NO: 51 - DNA, 1767 bp, synthetic construct
  source 1..1767: mol_type = other DNA
acggcccctaccggaaagcggatagacgaccactttccaaaaagaaagaaggctcggaccgaagaggactccaagccttccacctcgtcagacgccgaagctggacccagcggatcccagcagctgcaaatcccagcccaaccagcctcaagtttgggagctgatacaatgtctgcgggaggtggcggcccattgggcgacaataaccaaggtgccgatggagtgggcaatgcctcgggagattggcattgcgattccacgtggatgggggacagagtcgtcaccaagtccacccgaacctgggtgctgcccagctacaacaaccaccagtaccgagagatcaaaagcggctccgtcgacggaagcaacgccaacgcctactttggatacagcaccccctgggggtactttgactttaaccgcttccacagccactggagcccccgagactggcaaagactcatcaacaactactggggcttcagaccccggtccctcagagtcaaaatcttcaacattcaagtcaaagaggtcacggtgcaggactccaccaccaccatcgccaacaacctcacctccaccgtccaagtgtttacggacgacgactaccagctgccctacgtcgtcggcaacgggaccgagggatgcctgccggccttccctccgcaggtctttacgctgccgcagtacggttacgcgacgctgaaccgcgacaacacagaaaatcccaccgagaggagcagcttcttcgtcctagagtactttcccagcaagatgctgagaacgggcaacaactttgagtttacctacaactttgaggaggtgcccttccactccagcttcgctcccagtcagaacctcttcaagctggccaacccgctggtggaccagtacttgtaccgcttcgtgagcacaaataacactggcggagtccagttcaacaagaacctggccgggagatacgccaacacctacaaaaactggttcccggggcccatgggccgaacccagggctggaacctgggctccggggtcaaccgcgccagtgtcagcgccttcgccacgaccaataggatggagctcgagggcgcgagttaccaggtgcccccgcagccgaacggcatgaccaacaacctccagggcagcaacacctatgccctggagaacactatgatcttcaacagccagccggcgaacccgggcaccaccgccacgtacctcgagggcaacatgctcatcaccagcgagagcgagacgcagccggtgaaccgcgtggcgtacaacgtcggcgggcagatggccaccaacaaccagagctccaccactgcccccgcgaccggcacgtacaacctccaggaaatcgtgcccggcagcgtgtggatggagagggacgtgtacctccaaggacccatctgggccaagatcccagagacgggggcgcactttcacccctctccggccatgggcggattcggactcaaacacccaccgcccatgatgctcatcaagaacacgcctgtgcccggaaatatcaccagcttctcggacgtgcccgtcagcagcttcatcacccagtacagcaccgggcaggtcaccgtggagatggagtgggagctcaagaaggaaaactccaagaggtggaacccagagatccagtacacaaacaactacaacgacccccagtttgtggactttgccccggacagcaccggggaatacagaaccaccagacctatcggaacccgataccttacccgacccctttaa

SEQ ID NO: 52 - protein, 588 aa, synthetic construct
TAPTGKRIDDHFPKRKKARTEEDSKPSTSSDAEAGPSGSQQLQIPAQPASSLGADTMSAGGGGPLGDNNQGADGVGNASGDWHCDSTWMGDRVVTKSTRTWVLPSYNNHQYREIKSGSVDGSNANAYFGYSTPWGYFDFNRFHSHWSPRDWQRLINNYWGFRPRSLRVKIFNIQVKEVTVQDSTTTIANNLTSTVQVFTDDDYQLPYVVGNGTEGCLPAFPPQVFTLPQYGYATLNRDNTENPTERSSFFVLEYFPSKMLRTGNNFEFTYNFEEVPFHSSFAPSQNLFKLANPLVDQYLYRFVSTNNTGGVQFNKNLAGRYANTYKNWFPGPMGRTQGWNLGSGVNRASVSAFATTNRMELEGASYQVPPQPNGMTNNLQGSNTYALENTMIFNSQPANPGTTATYLEGNMLITSESETQPVNRVAYNVGGQMATNNQSSTTAPATGTYNLQEIVPGSVWMERDVYLQGPIWAKIPETGAHFHPSPAMGGFGLKHPPPMMLIKNTPVPGNITSFSDVPVSSFITQYSTGQVTVEMEWELKKENSKRWNPEIQYTNNYNDPQFVDFAPDSTGEYRTTRPIGTRYLTRPL

SEQ ID NO: 53 - DNA, 1599 bp, synthetic construct
  source 1..1599: mol_type = other DNA
atgtctgcgggaggtggcggcccattgggcgacaataaccaaggtgccgatggagtgggcaatgcctcgggagattggcattgcgattccacgtggatgggggacagagtcgtcaccaagtccacccgaacctgggtgctgcccagctacaacaaccaccagtaccgagagatcaaaagcggctccgtcgacggaagcaacgccaacgcctactttggatacagcaccccctgggggtactttgactttaaccgcttccacagccactggagcccccgagactggcaaagactcatcaacaactactggggcttcagaccccggtccctcagagtcaaaatcttcaacattcaagtcaaagaggtcacggtgcaggactccaccaccaccatcgccaacaacctcacctccaccgtccaagtgtttacggacgacgactaccagctgccctacgtcgtcggcaacgggaccgagggatgcctgccggccttccctccgcaggtctttacgctgccgcagtacggttacgcgacgctgaaccgcgacaacacagaaaatcccaccgagaggagcagcttcttcgtcctagagtactttcccagcaagatgctgagaacgggcaacaactttgagtttacctacaactttgaggaggtgcccttccactccagcttcgctcccagtcagaacctcttcaagctggccaacccgctggtggaccagtacttgtaccgcttcgtgagcacaaataacactggcggagtccagttcaacaagaacctggccgggagatacgccaacacctacaaaaactggttcccggggcccatgggccgaacccagggctggaacctgggctccggggtcaaccgcgccagtgtcagcgccttcgccacgaccaataggatggagctcgagggcgcgagttaccaggtgcccccgcagccgaacggcatgaccaacaacctccagggcagcaacacctatgccctggagaacactatgatcttcaacagccagccggcgaacccgggcaccaccgccacgtacctcgagggcaacatgctcatcaccagcgagagcgagacgcagccggtgaaccgcgtggcgtacaacgtcggcgggcagatggccaccaacaaccagagctccaccactgcccccgcgaccggcacgtacaacctccaggaaatcgtgcccggcagcgtgtggatggagagggacgtgtacctccaaggacccatctgggccaagatcccagagacgggggcgcactttcacccctctccggccatgggcggattcggactcaaacacccaccgcccatgatgctcatcaagaacacgcctgtgcccggaaatatcaccagcttctcggacgtgcccgtcagcagcttcatcacccagtacagcaccgggcaggtcaccgtggagatggagtgggagctcaagaaggaaaactccaagaggtggaacccagagatccagtacacaaacaactacaacgacccccagtttgtggactttgccccggacagcaccggggaatacagaaccaccagacctatcggaacccgataccttacccgacccctttaa

SEQ ID NO: 54 - protein, 532 aa, synthetic construct
MSAGGGGPLGDNNQGADGVGNASGDWHCDSTWMGDRVVTKSTRTWVLPSYNNHQYREIKSGSVDGSNANAYFGYSTPWGYFDFNRFHSHWSPRDWQRLINNYWGFRPRSLRVKIFNIQVKEVTVQDSTTTIANNLTSTVQVFTDDDYQLPYVVGNGTEGCLPAFPPQVFTLPQYGYATLNRDNTENPTERSSFFVLEYFPSKMLRTGNNFEFTYNFEEVPFHSSFAPSQNLFKLANPLVDQYLYRFVSTNNTGGVQFNKNLAGRYANTYKNWFPGPMGRTQGWNLGSGVNRASVSAFATTNRMELEGASYQVPPQPNGMTNNLQGSNTYALENTMIFNSQPANPGTTATYLEGNMLITSESETQPVNRVAYNVGGQMATNNQSSTTAPATGTYNLQEIVPGSVWMERDVYLQGPIWAKIPETGAHFHPSPAMGGFGLKHPPPMMLIKNTPVPGNITSFSDVPVSSFITQYSTGQVTVEMEWELKKENSKRWNPEIQYTNNYNDPQFVDFAPDSTGEYRTTRPIGTRYLTRPL

SEQ ID NO: 55 - DNA, 2175 bp, synthetic construct
  source 1..2175: mol_type = other DNA
atggcttttgttgatcaccctccagattggttggaagaagttggtgaaggtcttcgcgagtttttgggccttgaagcgggcccaccgaaaccaaaacccaatcagcagcatcaagatcaagcccgtggtcttgtgctgcctggttataactatctcggacccggaaacggtctcgatcgaggagagcctgtcaacagggcagacgaggtcgcgcgagagcacgacatctcgtacaacgagcagcttgaggcgggagacaacccctacctcaagtacaaccacgcggacgccgagtttcaggagaagctcgccgacgacacatccttcgggggaaacctcggaaaggcagtctttcaggccaagaaaagggttctcgaaccttttggcctggttgaagagggtgctaagacggcccctaccggaaagcggatagacgaccactttccaaaaagaaagaaggctcggaccgaagaggactccaagccttccacctcgtcagacgccgaagctggacccagcggatcccagcagctgcaaatcccagcccaaccagcctcaagtttgggagctgatacaatgtctgcgggaggtggcggcccattgggcgacaataaccaaggtgccgatggagtgggcaatgcctcgggagattggcattgcgattccacgtggatgggggacagagtcgtcaccaagtccacccgaacctgggtgctgcccagctacaacaaccaccagtaccgagagatcaaaagcggctccgtcgacggaagcaacgccaacgcctactttggatacagcaccccctgggggtactttgactttaaccgcttccacagccactggagcccccgagactggcaaagactcatcaacaactactggggcttcagaccccggtccctcagagtcaaaatcttcaacattcaagtcaaagaggtcacggtgcaggactccaccaccaccatcgccaacaacctcacctccaccgtccaagtgtttacggacgacgactaccagctgccctacgtcgtcggcaacgggaccgagggatgcctgccggccttccctccgcaggtctttacgctgccgcagtacggttacgcgacgctgaaccgcgacaacacagaaaatcccaccgagaggagcagcttcttcgtcctagagtactttcccagcaagatgctgagaacgggcaacaactttgagtttacctacaactttgaggaggtgcccttccactccagcttcgctcccagtcagaacctcttcaagctggccaacccgctggtggaccagtacttgtaccgcttcgtgagcacaaataacactggcggagtccagttcaacaagaacctggccgggagatacgccaacacctacaaaaactggttcccggggcccatgggccgaacccagggctggaacctgggctccggggtcaaccgcgccagtgtcagcgccttcgccacgaccaataggatggagctcgagggcgcgagttaccaggtgcccccgcagccgaacggcatgaccaacaacctccagggcagcaacacctatgccctggagaacactatgatcttcaacagccagccggcgaacccgggcaccaccgccacgtacctcgagggcaacatgctcatcaccagcgagagcgagacgcagccggtgaaccgcgtggcgtacaacgtcggcgggcagatggccaccaacaaccagagctccaccactgcccccgcgaccggcacgtacaacctccaggaaatcgtgcccggcagcgtgtggatggagagggacgtgtacctccaaggacccatctgggccaagatcccagagacgggggcgcactttcacccctctccggccatgggcggattcggactcaaacacccaccgcccatgatgctcatcaagaacacgcctgtgcccggaaatatcaccagcttctcggacgtgcccgtcagcagcttcatcacccagtacagcaccgggcaggtcaccgtggagatggagtgggagctcaagaaggaaaactccaagaggtggaacccagagatccagtacacaaacaactacaacgacccccagtttgtggactttgccccggacagcaccggggaatacagaagcaccagacctatcggaacccgataccttacccgacccctttaa

SEQ ID NO: 56 - protein, 724 aa, synthetic construct
MAFVDHPPDWLEEVGEGLREFLGLEAGPPKPKPNQQHQDQARGLVLPGYNYLGPGNGLDRGEPVNRADEVAREHDISYNEQLEAGDNPYLKYNHADAEFQEKLADDTSFGGNLGKAVFQAKKRVLEPFGLVEEGAKTAPTGKRIDDHFPKRKKARTEEDSKPSTSSDAEAGPSGSQQLQIPAQPASSLGADTMSAGGGGPLGDNNQGADGVGNASGDWHCDSTWMGDRVVTKSTRTWVLPSYNNHQYREIKSGSVDGSNANAYFGYSTPWGYFDFNRFHSHWSPRDWQRLINNYWGFRPRSLRVKIFNIQVKEVTVQDSTTTIANNLTSTVQVFTDDDYQLPYVVGNGTEGCLPAFPPQVFTLPQYGYATLNRDNTENPTERSSFFVLEYFPSKMLRTGNNFEFTYNFEEVPFHSSFAPSQNLFKLANPLVDQYLYRFVSTNNTGGVQFNKNLAGRYANTYKNWFPGPMGRTQGWNLGSGVNRASVSAFATTNRMELEGASYQVPPQPNGMTNNLQGSNTYALENTMIFNSQPANPGTTATYLEGNMLITSESETQPVNRVAYNVGGQMATNNQSSTTAPATGTYNLQEIVPGSVWMERDVYLQGPIWAKIPETGAHFHPSPAMGGFGLKHPPPMMLIKNTPVPGNITSFSDVPVSSFITQYSTGQVTVEMEWELKKENSKRWNPEIQYTNNYNDPQFVDFAPDSTGEYRSTRPIGTRYLTRPL

SEQ ID NO: 57 - DNA, 1767 bp, synthetic construct
  source 1..1767: mol_type = other DNA
acggcccctaccggaaagcggatagacgaccactttccaaaaagaaagaaggctcggaccgaagaggactccaagccttccacctcgtcagacgccgaagctggacccagcggatcccagcagctgcaaatcccagcccaaccagcctcaagtttgggagctgatacaatgtctgcgggaggtggcggcccattgggcgacaataaccaaggtgccgatggagtgggcaatgcctcgggagattggcattgcgattccacgtggatgggggacagagtcgtcaccaagtccacccgaacctgggtgctgcccagctacaacaaccaccagtaccgagagatcaaaagcggctccgtcgacggaagcaacgccaacgcctactttggatacagcaccccctgggggtactttgactttaaccgcttccacagccactggagcccccgagactggcaaagactcatcaacaactactggggcttcagaccccggtccctcagagtcaaaatcttcaacattcaagtcaaagaggtcacggtgcaggactccaccaccaccatcgccaacaacctcacctccaccgtccaagtgtttacggacgacgactaccagctgccctacgtcgtcggcaacgggaccgagggatgcctgccggccttccctccgcaggtctttacgctgccgcagtacggttacgcgacgctgaaccgcgacaacacagaaaatcccaccgagaggagcagcttcttcgtcctagagtactttcccagcaagatgctgagaacgggcaacaactttgagtttacctacaactttgaggaggtgcccttccactccagcttcgctcccagtcagaacctcttcaagctggccaacccgctggtggaccagtacttgtaccgcttcgtgagcacaaataacactggcggagtccagttcaacaagaacctggccgggagatacgccaacacctacaaaaactggttcccggggcccatgggccgaacccagggctggaacctgggctccggggtcaaccgcgccagtgtcagcgccttcgccacgaccaataggatggagctcgagggcgcgagttaccaggtgcccccgcagccgaacggcatgaccaacaacctccagggcagcaacacctatgccctggagaacactatgatcttcaacagccagccggcgaacccgggcaccaccgccacgtacctcgagggcaacatgctcatcaccagcgagagcgagacgcagccggtgaaccgcgtggcgtacaacgtcggcgggcagatggccaccaacaaccagagctccaccactgcccccgcgaccggcacgtacaacctccaggaaatcgtgcccggcagcgtgtggatggagagggacgtgtacctccaaggacccatctgggccaagatcccagagacgggggcgcactttcacccctctccggccatgggcggattcggactcaaacacccaccgcccatgatgctcatcaagaacacgcctgtgcccggaaatatcaccagcttctcggacgtgcccgtcagcagcttcatcacccagtacagcaccgggcaggtcaccgtggagatggagtgggagctcaagaaggaaaactccaagaggtggaacccagagatccagtacacaaacaactacaacgacccccagtttgtggactttgccccggacagcaccggggaatacagaagcaccagacctatcggaacccgataccttacccgacccctttaa

SEQ ID NO: 58 - protein, 588 aa, synthetic construct
TAPTGKRIDDHFPKRKKARTEEDSKPSTSSDAEAGPSGSQQLQIPAQPASSLGADTMSAGGGGPLGDNNQGADGVGNASGDWHCDSTWMGDRVVTKSTRTWVLPSYNNHQYREIKSGSVDGSNANAYFGYSTPWGYFDFNRFHSHWSPRDWQRLINNYWGFRPRSLRVKIFNIQVKEVTVQDSTTTIANNLTSTVQVFTDDDYQLPYVVGNGTEGCLPAFPPQVFTLPQYGYATLNRDNTENPTERSSFFVLEYFPSKMLRTGNNFEFTYNFEEVPFHSSFAPSQNLFKLANPLVDQYLYRFVSTNNTGGVQFNKNLAGRYANTYKNWFPGPMGRTQGWNLGSGVNRASVSAFATTNRMELEGASYQVPPQPNGMTNNLQGSNTYALENTMIFNSQPANPGTTATYLEGNMLITSESETQPVNRVAYNVGGQMATNNQSSTTAPATGTYNLQEIVPGSVWMERDVYLQGPIWAKIPETGAHFHPSPAMGGFGLKHPPPMMLIKNTPVPGNITSFSDVPVSSFITQYSTGQVTVEMEWELKKENSKRWNPEIQYTNNYNDPQFVDFAPDSTGEYRSTRPIGTRYLTRPL

SEQ ID NO: 59 - DNA, 1599 bp, synthetic construct
  source 1..1599: mol_type = other DNA
atgtctgcgggaggtggcggcccattgggcgacaataaccaaggtgccgatggagtgggcaatgcctcgggagattggcattgcgattccacgtggatgggggacagagtcgtcaccaagtccacccgaacctgggtgctgcccagctacaacaaccaccagtaccgagagatcaaaagcggctccgtcgacggaagcaacgccaacgcctactttggatacagcaccccctgggggtactttgactttaaccgcttccacagccactggagcccccgagactggcaaagactcatcaacaactactggggcttcagaccccggtccctcagagtcaaaatcttcaacattcaagtcaaagaggtcacggtgcaggactccaccaccaccatcgccaacaacctcacctccaccgtccaagtgtttacggacgacgactaccagctgccctacgtcgtcggcaacgggaccgagggatgcctgccggccttccctccgcaggtctttacgctgccgcagtacggttacgcgacgctgaaccgcgacaacacagaaaatcccaccgagaggagcagcttcttcgtcctagagtactttcccagcaagatgctgagaacgggcaacaactttgagtttacctacaactttgaggaggtgcccttccactccagcttcgctcccagtcagaacctcttcaagctggccaacccgctggtggaccagtacttgtaccgcttcgtgagcacaaataacactggcggagtccagttcaacaagaacctggccgggagatacgccaacacctacaaaaactggttcccggggcccatgggccgaacccagggctggaacctgggctccggggtcaaccgcgccagtgtcagcgccttcgccacgaccaataggatggagctcgagggcgcgagttaccaggtgcccccgcagccgaacggcatgaccaacaacctccagggcagcaacacctatgccctggagaacactatgatcttcaacagccagccggcgaacccgggcaccaccgccacgtacctcgagggcaacatgctcatcaccagcgagagcgagacgcagccggtgaaccgcgtggcgtacaacgtcggcgggcagatggccaccaacaaccagagctccaccactgcccccgcgaccggcacgtacaacctccaggaaatcgtgcccggcagcgtgtggatggagagggacgtgtacctccaaggacccatctgggccaagatcccagagacgggggcgcactttcacccctctccggccatgggcggattcggactcaaacacccaccgcccatgatgctcatcaagaacacgcctgtgcccggaaatatcaccagcttctcggacgtgcccgtcagcagcttcatcacccagtacagcaccgggcaggtcaccgtggagatggagtgggagctcaagaaggaaaactccaagaggtggaacccagagatccagtacacaaacaactacaacgacccccagtttgtggactttgccccggacagcaccggggaatacagaagcaccagacctatcggaacccgataccttacccgacccctttaa

SEQ ID NO: 60 - protein, 532 aa, synthetic construct
MSAGGGGPLGDNNQGADGVGNASGDWHCDSTWMGDRVVTKSTRTWVLPSYNNHQYREIKSGSVDGSNANAYFGYSTPWGYFDFNRFHSHWSPRDWQRLINNYWGFRPRSLRVKIFNIQVKEVTVQDSTTTIANNLTSTVQVFTDDDYQLPYVVGNGTEGCLPAFPPQVFTLPQYGYATLNRDNTENPTERSSFFVLEYFPSKMLRTGNNFEFTYNFEEVPFHSSFAPSQNLFKLANPLVDQYLYRFVSTNNTGGVQFNKNLAGRYANTYKNWFPGPMGRTQGWNLGSGVNRASVSAFATTNRMELEGASYQVPPQPNGMTNNLQGSNTYALENTMIFNSQPANPGTTATYLEGNMLITSESETQPVNRVAYNVGGQMATNNQSSTTAPATGTYNLQEIVPGSVWMERDVYLQGPIWAKIPETGAHFHPSPAMGGFGLKHPPPMMLIKNTPVPGNITSFSDVPVSSFITQYSTGQVTVEMEWELKKENSKRWNPEIQYTNNYNDPQFVDFAPDSTGEYRSTRPIGTRYLTRPL

SEQ ID NO: 61 - DNA, 2175 bp, synthetic construct
  source 1..2175: mol_type = other DNA
atgtcttttgttgatcaccctccagattggttggaagaagttggtgaaggtcttcgcgagtttttgggccttgaagcgggcccaccgaaaccaaaacccaatcagcagcatcaagatcaagcccgtggtcttgtgctgcctggttataactatctcggacccggaaacggtctcgatcgaggagagcctgtcaacagggcagacgaggtcgcgcgagagcacgacatctcgtacaacgagcagcttgaggcgggagacaacccctacctcaagtacaaccacgcggacgccgagtttcaggagaagctcgccgacgacacatccttcgggggaaacctcggaaaggcagtctttcaggccaagaaaagggttctcgaaccttttggcctggttgaagagggtgctaagacggcccctaccggaaagcggatagacgaccactttccaaaaagaaagaaggctcggaccgaagaggactccaagccttccacctcgtcagacgccgaagctggacccagcggatcccagcagctgcaaatcccagcccaaccagcctcaagtttgggagctgatacaatgtctgcgggaggtggcggcccattgggcgacaataaccaaggtgccgatggagtgggcaatgcctcgggagattggcattgcgattccacgtggatgggggacagagtcgtcaccaagtccacccgaacctgggtgctgcccagctacaacaaccaccagtaccgagagatcaaaagcggctccgtcgacggaagcaacgccaacgcctactttggatacagcaccccctgggggtactttgactttaaccgcttccacagccactggagcccccgagactggcaaagactcatcaacaactactggggcttcagaccccggtccctcagagtcaaaatcttcaacattcaagtcaaagaggtcacggtgcaggactccaccaccaccatcgccaacaacctcacctccaccgtccaagtgtttacggacgacgactaccagctgccctacgtcgtcggcaacgggaccgagggatgcctgccggccttccctccgcaggtctttacgctgccgcagtacggttacgcgacgctgaaccgcgacaacacagaaaatcccaccgagaggagcagcttcttctgcctagagtactttcccagcaagatgctgagaacgggcaacaactttgagtttacctacaactttgaggaggtgcccttccactccagcttcgctcccagtcacaacctcttcaagctggccaacccgctggtggaccagtacttgtaccgcttcgtgagcacaaataacactggcggagtccagttcaacaagaacctggccgggagatacgccaacacctacaaaaactggttcccggggcccatgggccgaacccagggctggaacctgggctccggggtcaaccgcgccagtgtcagcgccttcgccacgaccaataggatggagctcgagggcgcgagttaccaggtgcccccgcagccgaacggcatgaccaacaacctccagggcagcaacacctatgccctggagaacactatgatcttcaacagccagccggcgaacccgggcaccaccgccacgtacctcgagggcaacatgctcatcaccagcgagagcgagacgcagccggtgaaccgcgtggcgtacaacgtcggcgggcagatggccaccaacaaccagagctccaccactgcccccgcgaccggcacgtacaacctccaggaaatcgtgcccggcagcgtgtggatggagagggacgtgtacctccaaggacccatctgggccaagatcccagagacgggggcgcactttcacccctctccggccatgggcggattcggactcaaacacccaccgcccatgatgctcatcaagaacacgcctgtgcccggaaatatcaccagcttctcggacgtgcccgtcagcagcttcatcacccagtacagcaccgggcaggtcaccgtggagatggagtgggagctcaagaaggaaaactccaagaggtggaacccagagatccagtacacaaacaactacaacgacccccagtttgtggactttgccccggacagcaccggggaatacagaaccaccagacctatcggaacccgataccttacccgacccctttaa

SEQ ID NO: 62 - protein, 724 aa, synthetic construct
MSFVDHPPDWLEEVGEGLREFLGLEAGPPKPKPNQQHQDQARGLVLPGYNYLGPGNGLDRGEPVNRADEVAREHDISYNEQLEAGDNPYLKYNHADAEFQEKLADDTSFGGNLGKAVFQAKKRVLEPFGLVEEGAKTAPTGKRIDDHFPKRKKARTEEDSKPSTSSDAEAGPSGSQQLQIPAQPASSLGADTMSAGGGGPLGDNNQGADGVGNASGDWHCDSTWMGDRVVTKSTRTWVLPSYNNHQYREIKSGSVDGSNANAYFGYSTPWGYFDFNRFHSHWSPRDWQRLINNYWGFRPRSLRVKIFNIQVKEVTVQDSTTTIANNLTSTVQVFTDDDYQLPYVVGNGTEGCLPAFPPQVFTLPQYGYATLNRDNTENPTERSSFFCLEYFPSKMLRTGNNFEFTYNFEEVPFHSSFAPSHNLFKLANPLVDQYLYRFVSTNNTGGVQFNKNLAGRYANTYKNWFPGPMGRTQGWNLGSGVNRASVSAFATTNRMELEGASYQVPPQPNGMTNNLQGSNTYALENTMIFNSQPANPGTTATYLEGNMLITSESETQPVNRVAYNVGGQMATNNQSSTTAPATGTYNLQEIVPGSVWMERDVYLQGPIWAKIPETGAHFHPSPAMGGFGLKHPPPMMLIKNTPVPGNITSFSDVPVSSFITQYSTGQVTVEMEWELKKENSKRWNPEIQYTNNYNDPQFVDFAPDSTGEYRTTRPIGTRYLTRPL

SEQ ID NO: 63 - DNA, 1767 bp, synthetic construct
  source 1..1767: mol_type = other DNA
acggcccctaccggaaagcggatagacgaccactttccaaaaagaaagaaggctcggaccgaagaggactccaagccttccacctcgtcagacgccgaagctggacccagcggatcccagcagctgcaaatcccagcccaaccagcctcaagtttgggagctgatacaatgtctgcgggaggtggcggcccattgggcgacaataaccaaggtgccgatggagtgggcaatgcctcgggagattggcattgcgattccacgtggatgggggacagagtcgtcaccaagtccacccgaacctgggtgctgcccagctacaacaaccaccagtaccgagagatcaaaagcggctccgtcgacggaagcaacgccaacgcctactttggatacagcaccccctgggggtactttgactttaaccgcttccacagccactggagcccccgagactggcaaagactcatcaacaactactggggcttcagaccccggtccctcagagtcaaaatcttcaacattcaagtcaaagaggtcacggtgcaggactccaccaccaccatcgccaacaacctcacctccaccgtccaagtgtttacggacgacgactaccagctgccctacgtcgtcggcaacgggaccgagggatgcctgccggccttccctccgcaggtctttacgctgccgcagtacggttacgcgacgctgaaccgcgacaacacagaaaatcccaccgagaggagcagcttcttctgcctagagtactttcccagcaagatgctgagaacgggcaacaactttgagtttacctacaactttgaggaggtgcccttccactccagcttcgctcccagtcacaacctcttcaagctggccaacccgctggtggaccagtacttgtaccgcttcgtgagcacaaataacactggcggagtccagttcaacaagaacctggccgggagatacgccaacacctacaaaaactggttcccggggcccatgggccgaacccagggctggaacctgggctccggggtcaaccgcgccagtgtcagcgccttcgccacgaccaataggatggagctcgagggcgcgagttaccaggtgcccccgcagccgaacggcatgaccaacaacctccagggcagcaacacctatgccctggagaacactatgatcttcaacagccagccggcgaacccgggcaccaccgccacgtacctcgagggcaacatgctcatcaccagcgagagcgagacgcagccggtgaaccgcgtggcgtacaacgtcggcgggcagatggccaccaacaaccagagctccaccactgcccccgcgaccggcacgtacaacctccaggaaatcgtgcccggcagcgtgtggatggagagggacgtgtacctccaaggacccatctgggccaagatcccagagacgggggcgcactttcacccctctccggccatgggcggattcggactcaaacacccaccgcccatgatgctcatcaagaacacgcctgtgcccggaaatatcaccagcttctcggacgtgcccgtcagcagcttcatcacccagtacagcaccgggcaggtcaccgtggagatggagtgggagctcaagaaggaaaactccaagaggtggaacccagagatccagtacacaaacaactacaacgacccccagtttgtggactttgccccggacagcaccggggaatacagaaccaccagacctatcggaacccgataccttacccgacccctttaa

SEQ ID NO: 64 - protein, 588 aa, synthetic construct
TAPTGKRIDDHFPKRKKARTEEDSKPSTSSDAEAGPSGSQQLQIPAQPASSLGADTMSAGGGGPLGDNNQGADGVGNASGDWHCDSTWMGDRVVTKSTRTWVLPSYNNHQYREIKSGSVDGSNANAYFGYSTPWGYFDFNRFHSHWSPRDWQRLINNYWGFRPRSLRVKIFNIQVKEVTVQDSTTTIANNLTSTVQVFTDDDYQLPYVVGNGTEGCLPAFPPQVFTLPQYGYATLNRDNTENPTERSSFFCLEYFPSKMLRTGNNFEFTYNFEEVPFHSSFAPSHNLFKLANPLVDQYLYRFVSTNNTGGVQFNKNLAGRYANTYKNWFPGPMGRTQGWNLGSGVNRASVSAFATTNRMELEGASYQVPPQPNGMTNNLQGSNTYALENTMIFNSQPANPGTTATYLEGNMLITSESETQPVNRVAYNVGGQMATNNQSSTTAPATGTYNLQEIVPGSVWMERDVYLQGPIWAKIPETGAHFHPSPAMGGFGLKHPPPMMLIKNTPVPGNITSFSDVPVSSFITQYSTGQVTVEMEWELKKENSKRWNPEIQYTNNYNDPQFVDFAPDSTGEYRTTRPIGTRYLTRPL

SEQ ID NO: 65 - DNA, 1599 bp, synthetic construct
  source 1..1599: mol_type = other DNA
atgtctgcgggaggtggcggcccattgggcgacaataaccaaggtgccgatggagtgggcaatgcctcgggagattggcattgcgattccacgtggatgggggacagagtcgtcaccaagtccacccgaacctgggtgctgcccagctacaacaaccaccagtaccgagagatcaaaagcggctccgtcgacggaagcaacgccaacgcctactttggatacagcaccccctgggggtactttgactttaaccgcttccacagccactggagcccccgagactggcaaagactcatcaacaactactggggcttcagaccccggtccctcagagtcaaaatcttcaacattcaagtcaaagaggtcacggtgcaggactccaccaccaccatcgccaacaacctcacctccaccgtccaagtgtttacggacgacgactaccagctgccctacgtcgtcggcaacgggaccgagggatgcctgccggccttccctccgcaggtctttacgctgccgcagtacggttacgcgacgctgaaccgcgacaacacagaaaatcccaccgagaggagcagcttcttctgcctagagtactttcccagcaagatgctgagaacgggcaacaactttgagtttacctacaactttgaggaggtgcccttccactccagcttcgctcccagtcacaacctcttcaagctggccaacccgctggtggaccagtacttgtaccgcttcgtgagcacaaataacactggcggagtccagttcaacaagaacctggccgggagatacgccaacacctacaaaaactggttcccggggcccatgggccgaacccagggctggaacctgggctccggggtcaaccgcgccagtgtcagcgccttcgccacgaccaataggatggagctcgagggcgcgagttaccaggtgcccccgcagccgaacggcatgaccaacaacctccagggcagcaacacctatgccctggagaacactatgatcttcaacagccagccggcgaacccgggcaccaccgccacgtacctcgagggcaacatgctcatcaccagcgagagcgagacgcagccggtgaaccgcgtggcgtacaacgtcggcgggcagatggccaccaacaaccagagctccaccactgcccccgcgaccggcacgtacaacctccaggaaatcgtgcccggcagcgtgtggatggagagggacgtgtacctccaaggacccatctgggccaagatcccagagacgggggcgcactttcacccctctccggccatgggcggattcggactcaaacacccaccgcccatgatgctcatcaagaacacgcctgtgcccggaaatatcaccagcttctcggacgtgcccgtcagcagcttcatcacccagtacagcaccgggcaggtcaccgtggagatggagtgggagctcaagaaggaaaactccaagaggtggaacccagagatccagtacacaaacaactacaacgacccccagtttgtggactttgccccggacagcaccggggaatacagaaccaccagacctatcggaacccgataccttacccgacccctttaa

SEQ ID NO: 66 - protein, 532 aa, synthetic construct
MSAGGGGPLGDNNQGADGVGNASGDWHCDSTWMGDRVVTKSTRTWVLPSYNNHQYREIKSGSVDGSNANAYFGYSTPWGYFDFNRFHSHWSPRDWQRLINNYWGFRPRSLRVKIFNIQVKEVTVQDSTTTIANNLTSTVQVFTDDDYQLPYVVGNGTEGCLPAFPPQVFTLPQYGYATLNRDNTENPTERSSFFCLEYFPSKMLRTGNNFEFTYNFEEVPFHSSFAPSHNLFKLANPLVDQYLYRFVSTNNTGGVQFNKNLAGRYANTYKNWFPGPMGRTQGWNLGSGVNRASVSAFATTNRMELEGASYQVPPQPNGMTNNLQGSNTYALENTMIFNSQPANPGTTATYLEGNMLITSESETQPVNRVAYNVGGQMATNNQSSTTAPATGTYNLQEIVPGSVWMERDVYLQGPIWAKIPETGAHFHPSPAMGGFGLKHPPPMMLIKNTPVPGNITSFSDVPVSSFITQYSTGQVTVEMEWELKKENSKRWNPEIQYTNNYNDPQFVDFAPDSTGEYRTTRPIGTRYLTRPL

SEQ ID NO: 67 - DNA, 2175 bp, synthetic construct
  source 1..2175: mol_type = other DNA
atggcttttgttgatcaccctccagattggttggaagaagttggtgaaggtcttcgcgagtttttgggccttgaagcgggcccaccgaaaccaaaacccaatcagcagcatcaagatcaagcccgtggtcttgtgctgcctggttataactatctcggacccggaaacggtctcgatcgaggagagcctgtcaacagggcagacgaggtcgcgcgagagcacgacatctcgtacaacgagcagcttgaggcgggagacaacccctacctcaagtacaaccacgcggacgccgagtttcaggagaagctcgccgacgacacatccttcgggggaaacctcggaaaggcagtctttcaggccaagaaaagggttctcgaaccttttggcctggttgaagagggtgctaagacggcccctaccggaaagcggatagacgaccactttccaaaaagaaagaaggctcggaccgaagaggactccaagccttccacctcgtcagacgccgaagctggacccagcggatcccagcagctgcaaatcccagcccaaccagcctcaagtttgggagctgatacaatgtctgcgggaggtggcggcccattgggcgacaataaccaaggtgccgatggagtgggcaatgcctcgggagattggcattgcgattccacgtggatgggggacagagtcgtcaccaagtccacccgaacctgggtgctgcccagctacaacaaccaccagtaccgagagatcaaaagcggctccgtcgacggaagcaacgccaacgcctactttggatacagcaccccctgggggtactttgactttaaccgcttccacagccactggagcccccgagactggcaaagactcatcaacaactactggggcttcagaccccggtccctcagagtcaaaatcttcaacattcaagtcaaagaggtcacggtgcaggactccaccaccaccatcgccaacaacctcacctccaccgtccaagtgtttacggacgacgactaccagctgccctacgtcgtcggcaacgggaccgagggatgcctgccggccttccctccgcaggtctttacgctgccgcagtacggttacgcgacgctgaaccgcgacaacacagaaaatcccaccgagaggagcagcttcttctgcctagagtactttcccagcaagatgctgagaacgggcaacaactttgagtttacctacaactttgaggaggtgcccttccactccagcttcgctcccagtcacaacctcttcaagctggccaacccgctggtggaccagtacttgtaccgcttcgtgagcacaaataacactggcggagtccagttcaacaagaacctggccgggagatacgccaacacctacaaaaactggttcccggggcccatgggccgaacccagggctggaacctgggctccggggtcaaccgcgccagtgtcagcgccttcgccacgaccaataggatggagctcgagggcgcgagttaccaggtgcccccgcagccgaacggcatgaccaacaacctccagggcagcaacacctatgccctggagaacactatgatcttcaacagccagccggcgaacccgggcaccaccgccacgtacctcgagggcaacatgctcatcaccagcgagagcgagacgcagccggtgaaccgcgtggcgtacaacgtcggcgggcagatggccaccaacaaccagagctccaccactgcccccgcgaccggcacgtacaacctccaggaaatcgtgcccggcagcgtgtggatggagagggacgtgtacctccaaggacccatctgggccaagatcccagagacgggggcgcactttcacccctctccggccatgggcggattcggactcaaacacccaccgcccatgatgctcatcaagaacacgcctgtgcccggaaatatcaccagcttctcggacgtgcccgtcagcagcttcatcacccagtacagcaccgggcaggtcaccgtggagatggagtgggagctcaagaaggaaaactccaagaggtggaacccagagatccagtacacaaacaactacaacgacccccagtttgtggactttgccccggacagcaccggggaatacagaagcaccagacctatcggaacccgataccttacccgacccctttaa

SEQ ID NO: 68 - protein, 724 aa, synthetic construct
MAFVDHPPDWLEEVGEGLREFLGLEAGPPKPKPNQQHQDQARGLVLPGYNYLGPGNGLDRGEPVNRADEVAREHDISYNEQLEAGDNPYLKYNHADAEFQEKLADDTSFGGNLGKAVFQAKKRVLEPFGLVEEGAKTAPTGKRIDDHFPKRKKARTEEDSKPSTSSDAEAGPSGSQQLQIPAQPASSLGADTMSAGGGGPLGDNNQGADGVGNASGDWHCDSTWMGDRVVTKSTRTWVLPSYNNHQYREIKSGSVDGSNANAYFGYSTPWGYFDFNRFHSHWSPRDWQRLINNYWGFRPRSLRVKIFNIQVKEVTVQDSTTTIANNLTSTVQVFTDDDYQLPYVVGNGTEGCLPAFPPQVFTLPQYGYATLNRDNTENPTERSSFFCLEYFPSKMLRTGNNFEFTYNFEEVPFHSSFAPSHNLFKLANPLVDQYLYRFVSTNNTGGVQFNKNLAGRYANTYKNWFPGPMGRTQGWNLGSGVNRASVSAFATTNRMELEGASYQVPPQPNGMTNNLQGSNTYALENTMIFNSQPANPGTTATYLEGNMLITSESETQPVNRVAYNVGGQMATNNQSSTTAPATGTYNLQEIVPGSVWMERDVYLQGPIWAKIPETGAHFHPSPAMGGFGLKHPPPMMLIKNTPVPGNITSFSDVPVSSFITQYSTGQVTVEMEWELKKENSKRWNPEIQYTNNYNDPQFVDFAPDSTGEYRSTRPIGTRYLTRPL

SEQ ID NO: 69 - DNA, 1767 bp, synthetic construct
  source 1..1767: mol_type = other DNA
acggcccctaccggaaagcggatagacgaccactttccaaaaagaaagaaggctcggaccgaagaggactccaagccttccacctcgtcagacgccgaagctggacccagcggatcccagcagctgcaaatcccagcccaaccagcctcaagtttgggagctgatacaatgtctgcgggaggtggcggcccattgggcgacaataaccaaggtgccgatggagtgggcaatgcctcgggagattggcattgcgattccacgtggatgggggacagagtcgtcaccaagtccacccgaacctgggtgctgcccagctacaacaaccaccagtaccgagagatcaaaagcggctccgtcgacggaagcaacgccaacgcctactttggatacagcaccccctgggggtactttgactttaaccgcttccacagccactggagcccccgagactggcaaagactcatcaacaactactggggcttcagaccccggtccctcagagtcaaaatcttcaacattcaagtcaaagaggtcacggtgcaggactccaccaccaccatcgccaacaacctcacctccaccgtccaagtgtttacggacgacgactaccagctgccctacgtcgtcggcaacgggaccgagggatgcctgccggccttccctccgcaggtctttacgctgccgcagtacggttacgcgacgctgaaccgcgacaacacagaaaatcccaccgagaggagcagcttcttctgcctagagtactttcccagcaagatgctgagaacgggcaacaactttgagtttacctacaactttgaggaggtgcccttccactccagcttcgctcccagtcacaacctcttcaagctggccaacccgctggtggaccagtacttgtaccgcttcgtgagcacaaataacactggcggagtccagttcaacaagaacctggccgggagatacgccaacacctacaaaaactggttcccggggcccatgggccgaacccagggctggaacctgggctccggggtcaaccgcgccagtgtcagcgccttcgccacgaccaataggatggagctcgagggcgcgagttaccaggtgcccccgcagccgaacggcatgaccaacaacctccagggcagcaacacctatgccctggagaacactatgatcttcaacagccagccggcgaacccgggcaccaccgccacgtacctcgagggcaacatgctcatcaccagcgagagcgagacgcagccggtgaaccgcgtggcgtacaacgtcggcgggcagatggccaccaacaaccagagctccaccactgcccccgcgaccggcacgtacaacctccaggaaatcgtgcccggcagcgtgtggatggagagggacgtgtacctccaaggacccatctgggccaagatcccagagacgggggcgcactttcacccctctccggccatgggcggattcggactcaaacacccaccgcccatgatgctcatcaagaacacgcctgtgcccggaaatatcaccagcttctcggacgtgcccgtcagcagcttcatcacccagtacagcaccgggcaggtcaccgtggagatggagtgggagctcaagaaggaaaactccaagaggtggaacccagagatccagtacacaaacaactacaacgacccccagtttgtggactttgccccggacagcaccggggaatacagaagcaccagacctatcggaacccgataccttacccgacccctttaa

SEQ ID NO: 70 - protein, 588 aa, synthetic construct
TAPTGKRIDDHFPKRKKARTEEDSKPSTSSDAEAGPSGSQQLQIPAQPASSLGADTMSAGGGGPLGDNNQGADGVGNASGDWHCDSTWMGDRVVTKSTRTWVLPSYNNHQYREIKSGSVDGSNANAYFGYSTPWGYFDFNRFHSHWSPRDWQRLINNYWGFRPRSLRVKIFNIQVKEVTVQDSTTTIANNLTSTVQVFTDDDYQLPYVVGNGTEGCLPAFPPQVFTLPQYGYATLNRDNTENPTERSSFFCLEYFPSKMLRTGNNFEFTYNFEEVPFHSSFAPSHNLFKLANPLVDQYLYRFVSTNNTGGVQFNKNLAGRYANTYKNWFPGPMGRTQGWNLGSGVNRASVSAFATTNRMELEGASYQVPPQPNGMTNNLQGSNTYALENTMIFNSQPANPGTTATYLEGNMLITSESETQPVNRVAYNVGGQMATNNQSSTTAPATGTYNLQEIVPGSVWMERDVYLQGPIWAKIPETGAHFHPSPAMGGFGLKHPPPMMLIKNTPVPGNITSFSDVPVSSFITQYSTGQVTVEMEWELKKENSKRWNPEIQYTNNYNDPQFVDFAPDSTGEYRSTRPIGTRYLTRPL

SEQ ID NO: 71 - DNA, 1599 bp, synthetic construct
  source 1..1599: mol_type = other DNA
atgtctgcgggaggtggcggcccattgggcgacaataaccaaggtgccgatggagtgggcaatgcctcgggagattggcattgcgattccacgtggatgggggacagagtcgtcaccaagtccacccgaacctgggtgctgcccagctacaacaaccaccagtaccgagagatcaaaagcggctccgtcgacggaagcaacgccaacgcctactttggatacagcaccccctgggggtactttgactttaaccgcttccacagccactggagcccccgagactggcaaagactcatcaacaactactggggcttcagaccccggtccctcagagtcaaaatcttcaacattcaagtcaaagaggtcacggtgcaggactccaccaccaccatcgccaacaacctcacctccaccgtccaagtgtttacggacgacgactaccagctgccctacgtcgtcggcaacgggaccgagggatgcctgccggccttccctccgcaggtctttacgctgccgcagtacggttacgcgacgctgaaccgcgacaacacagaaaatcccaccgagaggagcagcttcttctgcctagagtactttcccagcaagatgctgagaacgggcaacaactttgagtttacctacaactttgaggaggtgcccttccactccagcttcgctcccagtcacaacctcttcaagctggccaacccgctggtggaccagtacttgtaccgcttcgtgagcacaaataacactggcggagtccagttcaacaagaacctggccgggagatacgccaacacctacaaaaactggttcccggggcccatgggccgaacccagggctggaacctgggctccggggtcaaccgcgccagtgtcagcgccttcgccacgaccaataggatggagctcgagggcgcgagttaccaggtgcccccgcagccgaacggcatgaccaacaacctccagggcagcaacacctatgccctggagaacactatgatcttcaacagccagccggcgaacccgggcaccaccgccacgtacctcgagggcaacatgctcatcaccagcgagagcgagacgcagccggtgaaccgcgtggcgtacaacgtcggcgggcagatggccaccaacaaccagagctccaccactgcccccgcgaccggcacgtacaacctccaggaaatcgtgcccggcagcgtgtggatggagagggacgtgtacctccaaggacccatctgggccaagatcccagagacgggggcgcactttcacccctctccggccatgggcggattcggactcaaacacccaccgcccatgatgctcatcaagaacacgcctgtgcccggaaatatcaccagcttctcggacgtgcccgtcagcagcttcatcacccagtacagcaccgggcaggtcaccgtggagatggagtgggagctcaagaaggaaaactccaagaggtggaacccagagatccagtacacaaacaactacaacgacccccagtttgtggactttgccccggacagcaccggggaatacagaagcaccagacctatcggaacccgataccttacccgacccctttaa

SEQ ID NO: 72 - protein, 532 aa, synthetic construct
MSAGGGGPLGDNNQGADGVGNASGDWHCDSTWMGDRVVTKSTRTWVLPSYNNHQYREIKSGSVDGSNANAYFGYSTPWGYFDFNRFHSHWSPRDWQRLINNYWGFRPRSLRVKIFNIQVKEVTVQDSTTTIANNLTSTVQVFTDDDYQLPYVVGNGTEGCLPAFPPQVFTLPQYGYATLNRDNTENPTERSSFFCLEYFPSKMLRTGNNFEFTYNFEEVPFHSSFAPSHNLFKLANPLVDQYLYRFVSTNNTGGVQFNKNLAGRYANTYKNWFPGPMGRTQGWNLGSGVNRASVSAFATTNRMELEGASYQVPPQPNGMTNNLQGSNTYALENTMIFNSQPANPGTTATYLEGNMLITSESETQPVNRVAYNVGGQMATNNQSSTTAPATGTYNLQEIVPGSVWMERDVYLQGPIWAKIPETGAHFHPSPAMGGFGLKHPPPMMLIKNTPVPGNITSFSDVPVSSFITQYSTGQVTVEMEWELKKENSKRWNPEIQYTNNYNDPQFVDFAPDSTGEYRSTRPIGTRYLTRPL

SEQ ID NO: 73 - DNA, 2175 bp, synthetic construct
  source 1..2175: mol_type = other DNA
atgtcttttgttgatcaccctccagattggttggaagaagttggtgaaggtcttcgcgagtttttgggccttgaagcgggcccaccgaaaccaaaacccaatcagcagcatcaagatcaagcccgtggtcttgtgctgcctggttataactatctcggacccggaaacggtctcgatcgaggagagcctgtcaacagggcagacgaggtcgcgcgagagcacgacatctcgtacaacgagcagcttgaggcgggagacaacccctacctcaagtacaaccacgcggacgccgagtttcaggagaagctcgccgacgacacatccttcgggggaaacctcggaaaggcagtctttcaggccaagaaaagggttctcgaaccttttggcctggttgaagagggtgctaagacggcccctaccggaaagcggatagacgaccactttccaaaaagaaagaaggctcggaccgaagaggactccaagccttccacctcgtcagacgccgaagctggacccagcggatcccagcagctgcaaatcccagcccaaccagcctcaagtttgggagctgatacaatgtctgcgggaggtggcggcccattgggcgacaataaccaaggtgccgatggagtgggcaatgcctcgggagattggcattgcgattccacgtggatgggggacagagtcgtcaccaagtccacccgaacctgggtgctgcccagctacaacaaccaccagtaccgagagatcaaaagcggctccgtcgacggaagcaacgccaacgcctactttggatacagcaccccctgggggtactttgactttaaccgcttccacagccactggagcccccgagactggcaaagactcatcaacaactactggggcttcagaccccggtccctcagagtcaaaatcttcaacattcaagtcaaagaggtcacggtgcaggactccaccaccaccatcgccaacaacctcacctccaccgtccaagtgtttacggacgacgactaccagctgccctacgtcgtcggcaacgggaccgagggatgcctgccggccttccctccgcaggtctttacgctgccgcagtacggttacgcgacgctgaaccgcgacaacacagaaaatcccaccgagaggagcagcttcttctgcctagagtactttcccagcaagatgctgagaacgggcaacaactttgagtttacctacaactttgaggaggtgcccttccactccagcttcgctcccagtcagaacctcttcaagctggccaacccgctggtggaccagtacttgtaccgcttcgtgagcacaaataacactggcggagtccagttcaacaagaacctggccgggagatacgccaacacctacaaaaactggttcaccgggcccatgggccgaacccagggctggaacctgggctccggggtcaaccgcgccagtgtcagcgccttcgccacgaccaataggatggagctcgagggcgcgagttaccaggtgcccccgcagccgaacggcatgaccaacaacctccagggcagcaacacctatgccctggagaacactatgatcttcaacagccagccggcgaacccgggcaccaccgccacgtacctcgagggcaacatgctcatcaccagcgagagcgagacgcagccggtgaaccgcgtggcgtacaacgtcggcgggcagatggccaccaacaaccagagctccaccactgcccccgcgaccggcacgtacaacctccaggaaatcgtgcccggcagcgtgtggatggagagggacgtgtacctccaaggacccatctgggccaagatcccagagacgggggcgcactttcacccctctccggccatgggcggattcggactcaaacacccaccgcccatgatgctcatcaagaacacgcctgtgcccggaaatatcaccagcttctcggacgtgcccgtcagcagcttcatcacccagtacagcaccgggcaggtcaccgtggagatggagtgggagctcaagaaggaaaactccaagaggtggaacccagagatccagtacacaaacaactacaacgacccccagtttgtggactttgccccggacagcaccggggaatacagaaccaccagacctatcggaacccgataccttacccgacccctttaa

SEQ ID NO: 74 - protein, 724 aa, synthetic construct
MSFVDHPPDWLEEVGEGLREFLGLEAGPPKPKPNQQHQDQARGLVLPGYNYLGPGNGLDRGEPVNRADEVAREHDISYNEQLEAGDNPYLKYNHADAEFQEKLADDTSFGGNLGKAVFQAKKRVLEPFGLVEEGAKTAPTGKRIDDHFPKRKKARTEEDSKPSTSSDAEAGPSGSQQLQIPAQPASSLGADTMSAGGGGPLGDNNQGADGVGNASGDWHCDSTWMGDRVVTKSTRTWVLPSYNNHQYREIKSGSVDGSNANAYFGYSTPWGYFDFNRFHSHWSPRDWQRLINNYWGFRPRSLRVKIFNIQVKEVTVQDSTTTIANNLTSTVQVFTDDDYQLPYVVGNGTEGCLPAFPPQVFTLPQYGYATLNRDNTENPTERSSFFCLEYFPSKMLRTGNNFEFTYNFEEVPFHSSFAPSQNLFKLANPLVDQYLYRFVSTNNTGGVQFNKNLAGRYANTYKNWFTGPMGRTQGWNLGSGVNRASVSAFATTNRMELEGASYQVPPQPNGMTNNLQGSNTYALENTMIFNSQPANPGTTATYLEGNMLITSESETQPVNRVAYNVGGQMATNNQSSTTAPATGTYNLQEIVPGSVWMERDVYLQGPIWAKIPETGAHFHPSPAMGGFGLKHPPPMMLIKNTPVPGNITSFSDVPVSSFITQYSTGQVTVEMEWELKKENSKRWNPEIQYTNNYNDPQFVDFAPDSTGEYRTTRPIGTRYLTRPL

SEQ ID NO: 75 - DNA, 1767 bp, synthetic construct
  source 1..1767: mol_type = other DNA
acggcccctaccggaaagcggatagacgaccactttccaaaaagaaagaaggctcggaccgaagaggactccaagccttccacctcgtcagacgccgaagctggacccagcggatcccagcagctgcaaatcccagcccaaccagcctcaagtttgggagctgatacaatgtctgcgggaggtggcggcccattgggcgacaataaccaaggtgccgatggagtgggcaatgcctcgggagattggcattgcgattccacgtggatgggggacagagtcgtcaccaagtccacccgaacctgggtgctgcccagctacaacaaccaccagtaccgagagatcaaaagcggctccgtcgacggaagcaacgccaacgcctactttggatacagcaccccctgggggtactttgactttaaccgcttccacagccactggagcccccgagactggcaaagactcatcaacaactactggggcttcagaccccggtccctcagagtcaaaatcttcaacattcaagtcaaagaggtcacggtgcaggactccaccaccaccatcgccaacaacctcacctccaccgtccaagtgtttacggacgacgactaccagctgccctacgtcgtcggcaacgggaccgagggatgcctgccggccttccctccgcaggtctttacgctgccgcagtacggttacgcgacgctgaaccgcgacaacacagaaaatcccaccgagaggagcagcttcttctgcctagagtactttcccagcaagatgctgagaacgggcaacaactttgagtttacctacaactttgaggaggtgcccttccactccagcttcgctcccagtcagaacctcttcaagctggccaacccgctggtggaccagtacttgtaccgcttcgtgagcacaaataacactggcggagtccagttcaacaagaacctggccgggagatacgccaacacctacaaaaactggttcaccgggcccatgggccgaacccagggctggaacctgggctccggggtcaaccgcgccagtgtcagcgccttcgccacgaccaataggatggagctcgagggcgcgagttaccaggtgcccccgcagccgaacggcatgaccaacaacctccagggcagcaacacctatgccctggagaacactatgatcttcaacagccagccggcgaacccgggcaccaccgccacgtacctcgagggcaacatgctcatcaccagcgagagcgagacgcagccggtgaaccgcgtggcgtacaacgtcggcgggcagatggccaccaacaaccagagctccaccactgcccccgcgaccggcacgtacaacctccaggaaatcgtgcccggcagcgtgtggatggagagggacgtgtacctccaaggacccatctgggccaagatcccagagacgggggcgcactttcacccctctccggccatgggcggattcggactcaaacacccaccgcccatgatgctcatcaagaacacgcctgtgcccggaaatatcaccagcttctcggacgtgcccgtcagcagcttcatcacccagtacagcaccgggcaggtcaccgtggagatggagtgggagctcaagaaggaaaactccaagaggtggaacccagagatccagtacacaaacaactacaacgacccccagtttgtggactttgccccggacagcaccggggaatacagaaccaccagacctatcggaacccgataccttacccgacccctttaa

SEQ ID NO: 76 - protein, 588 aa, synthetic construct
TAPTGKRIDDHFPKRKKARTEEDSKPSTSSDAEAGPSGSQQLQIPAQPASSLGADTMSAGGGGPLGDNNQGADGVGNASGDWHCDSTWMGDRVVTKSTRTWVLPSYNNHQYREIKSGSVDGSNANAYFGYSTPWGYFDFNRFHSHWSPRDWQRLINNYWGFRPRSLRVKIFNIQVKEVTVQDSTTTIANNLTSTVQVFTDDDYQLPYVVGNGTEGCLPAFPPQVFTLPQYGYATLNRDNTENPTERSSFFCLEYFPSKMLRTGNNFEFTYNFEEVPFHSSFAPSQNLFKLANPLVDQYLYRFVSTNNTGGVQFNKNLAGRYANTYKNWFTGPMGRTQGWNLGSGVNRASVSAFATTNRMELEGASYQVPPQPNGMTNNLQGSNTYALENTMIFNSQPANPGTTATYLEGNMLITSESETQPVNRVAYNVGGQMATNNQSSTTAPATGTYNLQEIVPGSVWMERDVYLQGPIWAKIPETGAHFHPSPAMGGFGLKHPPPMMLIKNTPVPGNITSFSDVPVSSFITQYSTGQVTVEMEWELKKENSKRWNPEIQYTNNYNDPQFVDFAPDSTGEYRTTRPIGTRYLTRPL

SEQ ID NO: 77 - DNA, 1599 bp, synthetic construct
  source 1..1599: mol_type = other DNA
atgtctgcgggaggtggcggcccattgggcgacaataaccaaggtgccgatggagtgggcaatgcctcgggagattggcattgcgattccacgtggatgggggacagagtcgtcaccaagtccacccgaacctgggtgctgcccagctacaacaaccaccagtaccgagagatcaaaagcggctccgtcgacggaagcaacgccaacgcctactttggatacagcaccccctgggggtactttgactttaaccgcttccacagccactggagcccccgagactggcaaagactcatcaacaactactggggcttcagaccccggtccctcagagtcaaaatcttcaacattcaagtcaaagaggtcacggtgcaggactccaccaccaccatcgccaacaacctcacctccaccgtccaagtgtttacggacgacgactaccagctgccctacgtcgtcggcaacgggaccgagggatgcctgccggccttccctccgcaggtctttacgctgccgcagtacggttacgcgacgctgaaccgcgacaacacagaaaatcccaccgagaggagcagcttcttctgcctagagtactttcccagcaagatgctgagaacgggcaacaactttgagtttacctacaactttgaggaggtgcccttccactccagcttcgctcccagtcagaacctcttcaagctggccaacccgctggtggaccagtacttgtaccgcttcgtgagcacaaataacactggcggagtccagttcaacaagaacctggccgggagatacgccaacacctacaaaaactggttcaccgggcccatgggccgaacccagggctggaacctgggctccggggtcaaccgcgccagtgtcagcgccttcgccacgaccaataggatggagctcgagggcgcgagttaccaggtgcccccgcagccgaacggcatgaccaacaacctccagggcagcaacacctatgccctggagaacactatgatcttcaacagccagccggcgaacccgggcaccaccgccacgtacctcgagggcaacatgctcatcaccagcgagagcgagacgcagccggtgaaccgcgtggcgtacaacgtcggcgggcagatggccaccaacaaccagagctccaccactgcccccgcgaccggcacgtacaacctccaggaaatcgtgcccggcagcgtgtggatggagagggacgtgtacctccaaggacccatctgggccaagatcccagagacgggggcgcactttcacccctctccggccatgggcggattcggactcaaacacccaccgcccatgatgctcatcaagaacacgcctgtgcccggaaatatcaccagcttctcggacgtgcccgtcagcagcttcatcacccagtacagcaccgggcaggtcaccgtggagatggagtgggagctcaagaaggaaaactccaagaggtggaacccagagatccagtacacaaacaactacaacgacccccagtttgtggactttgccccggacagcaccggggaatacagaaccaccagacctatcggaacccgataccttacccgacccctttaa

SEQ ID NO: 78 - protein, 532 aa, synthetic construct
MSAGGGGPLGDNNQGADGVGNASGDWHCDSTWMGDRVVTKSTRTWVLPSYNNHQYREIKSGSVDGSNANAYFGYSTPWGYFDFNRFHSHWSPRDWQRLINNYWGFRPRSLRVKIFNIQVKEVTVQDSTTTIANNLTSTVQVFTDDDYQLPYVVGNGTEGCLPAFPPQVFTLPQYGYATLNRDNTENPTERSSFFCLEYFPSKMLRTGNNFEFTYNFEEVPFHSSFAPSQNLFKLANPLVDQYLYRFVSTNNTGGVQFNKNLAGRYANTYKNWFTGPMGRTQGWNLGSGVNRASVSAFATTNRMELEGASYQVPPQPNGMTNNLQGSNTYALENTMIFNSQPANPGTTATYLEGNMLITSESETQPVNRVAYNVGGQMATNNQSSTTAPATGTYNLQEIVPGSVWMERDVYLQGPIWAKIPETGAHFHPSPAMGGFGLKHPPPMMLIKNTPVPGNITSFSDVPVSSFITQYSTGQVTVEMEWELKKENSKRWNPEIQYTNNYNDPQFVDFAPDSTGEYRTTRPIGTRYLTRPL

SEQ ID NO: 79 - DNA, 2175 bp, synthetic construct
  source 1..2175: mol_type = other DNA
atggcttttgttgatcaccctccagattggttggaagaagttggtgaaggtcttcgcgagtttttgggccttgaagcgggcccaccgaaaccaaaacccaatcagcagcatcaagatcaagcccgtggtcttgtgctgcctggttataactatctcggacccggaaacggtctcgatcgaggagagcctgtcaacagggcagacgaggtcgcgcgagagcacgacatctcgtacaacgagcagcttgaggcgggagacaacccctacctcaagtacaaccacgcggacgccgagtttcaggagaagctcgccgacgacacatccttcgggggaaacctcggaaaggcagtctttcaggccaagaaaagggttctcgaaccttttggcctggttgaagagggtgctaagacggcccctaccggaaagcggatagacgaccactttccaaaaagaaagaaggctcggaccgaagaggactccaagccttccacctcgtcagacgccgaagctggacccagcggatcccagcagctgcaaatcccagcccaaccagcctcaagtttgggagctgatacaatgtctgcgggaggtggcggcccattgggcgacaataaccaaggtgccgatggagtgggcaatgcctcgggagattggcattgcgattccacgtggatgggggacagagtcgtcaccaagtccacccgaacctgggtgctgcccagctacaacaaccaccagtaccgagagatcaaaagcggctccgtcgacggaagcaacgccaacgcctactttggatacagcaccccctgggggtactttgactttaaccgcttccacagccactggagcccccgagactggcaaagactcatcaacaactactggggcttcagaccccggtccctcagagtcaaaatcttcaacattcaagtcaaagaggtcacggtgcaggactccaccaccaccatcgccaacaacctcacctccaccgtccaagtgtttacggacgacgactaccagctgccctacgtcgtcggcaacgggaccgagggatgcctgccggccttccctccgcaggtctttacgctgccgcagtacggttacgcgacgctgaaccgcgacaacacagaaaatcccaccgagaggagcagcttcttctgcctagagtactttcccagcaagatgctgagaacgggcaacaactttgagtttacctacaactttgaggaggtgcccttccactccagcttcgctcccagtcagaacctcttcaagctggccaacccgctggtggaccagtacttgtaccgcttcgtgagcacaaataacactggcggagtccagttcaacaagaacctggccgggagatacgccaacacctacaaaaactggttcaccgggcccatgggccgaacccagggctggaacctgggctccggggtcaaccgcgccagtgtcagcgccttcgccacgaccaataggatggagctcgagggcgcgagttaccaggtgcccccgcagccgaacggcatgaccaacaacctccagggcagcaacacctatgccctggagaacactatgatcttcaacagccagccggcgaacccgggcaccaccgccacgtacctcgagggcaacatgctcatcaccagcgagagcgagacgcagccggtgaaccgcgtggcgtacaacgtcggcgggcagatggccaccaacaaccagagctccaccactgcccccgcgaccggcacgtacaacctccaggaaatcgtgcccggcagcgtgtggatggagagggacgtgtacctccaaggacccatctgggccaagatcccagagacgggggcgcactttcacccctctccggccatgggcggattcggactcaaacacccaccgcccatgatgctcatcaagaacacgcctgtgcccggaaatatcaccagcttctcggacgtgcccgtcagcagcttcatcacccagtacagcaccgggcaggtcaccgtggagatggagtgggagctcaagaaggaaaactccaagaggtggaacccagagatccagtacacaaacaactacaacgacccccagtttgtggactttgccccggacagcaccggggaatacagaagcaccagacctatcggaacccgataccttacccgacccctttaa

SEQ ID NO: 80 - protein, 724 aa, synthetic construct
MAFVDHPPDWLEEVGEGLREFLGLEAGPPKPKPNQQHQDQARGLVLPGYNYLGPGNGLDRGEPVNRADEVAREHDISYNEQLEAGDNPYLKYNHADAEFQEKLADDTSFGGNLGKAVFQAKKRVLEPFGLVEEGAKTAPTGKRIDDHFPKRKKARTEEDSKPSTSSDAEAGPSGSQQLQIPAQPASSLGADTMSAGGGGPLGDNNQGADGVGNASGDWHCDSTWMGDRVVTKSTRTWVLPSYNNHQYREIKSGSVDGSNANAYFGYSTPWGYFDFNRFHSHWSPRDWQRLINNYWGFRPRSLRVKIFNIQVKEVTVQDSTTTIANNLTSTVQVFTDDDYQLPYVVGNGTEGCLPAFPPQVFTLPQYGYATLNRDNTENPTERSSFFCLEYFPSKMLRTGNNFEFTYNFEEVPFHSSFAPSQNLFKLANPLVDQYLYRFVSTNNTGGVQFNKNLAGRYANTYKNWFTGPMGRTQGWNLGSGVNRASVSAFATTNRMELEGASYQVPPQPNGMTNNLQGSNTYALENTMIFNSQPANPGTTATYLEGNMLITSESETQPVNRVAYNVGGQMATNNQSSTTAPATGTYNLQEIVPGSVWMERDVYLQGPIWAKIPETGAHFHPSPAMGGFGLKHPPPMMLIKNTPVPGNITSFSDVPVSSFITQYSTGQVTVEMEWELKKENSKRWNPEIQYTNNYNDPQFVDFAPDSTGEYRSTRPIGTRYLTRPL

SEQ ID NO: 81 - DNA, 1767 bp, synthetic construct
  source 1..1767: mol_type = other DNA
acggcccctaccggaaagcggatagacgaccactttccaaaaagaaagaaggctcggaccgaagaggactccaagccttccacctcgtcagacgccgaagctggacccagcggatcccagcagctgcaaatcccagcccaaccagcctcaagtttgggagctgatacaatgtctgcgggaggtggcggcccattgggcgacaataaccaaggtgccgatggagtgggcaatgcctcgggagattggcattgcgattccacgtggatgggggacagagtcgtcaccaagtccacccgaacctgggtgctgcccagctacaacaaccaccagtaccgagagatcaaaagcggctccgtcgacggaagcaacgccaacgcctactttggatacagcaccccctgggggtactttgactttaaccgcttccacagccactggagcccccgagactggcaaagactcatcaacaactactggggcttcagaccccggtccctcagagtcaaaatcttcaacattcaagtcaaagaggtcacggtgcaggactccaccaccaccatcgccaacaacctcacctccaccgtccaagtgtttacggacgacgactaccagctgccctacgtcgtcggcaacgggaccgagggatgcctgccggccttccctccgcaggtctttacgctgccgcagtacggttacgcgacgctgaaccgcgacaacacagaaaatcccaccgagaggagcagcttcttctgcctagagtactttcccagcaagatgctgagaacgggcaacaactttgagtttacctacaactttgaggaggtgcccttccactccagcttcgctcccagtcagaacctcttcaagctggccaacccgctggtggaccagtacttgtaccgcttcgtgagcacaaataacactggcggagtccagttcaacaagaacctggccgggagatacgccaacacctacaaaaactggttcaccgggcccatgggccgaacccagggctggaacctgggctccggggtcaaccgcgccagtgtcagcgccttcgccacgaccaataggatggagctcgagggcgcgagttaccaggtgcccccgcagccgaacggcatgaccaacaacctccagggcagcaacacctatgccctggagaacactatgatcttcaacagccagccggcgaacccgggcaccaccgccacgtacctcgagggcaacatgctcatcaccagcgagagcgagacgcagccggtgaaccgcgtggcgtacaacgtcggcgggcagatggccaccaacaaccagagctccaccactgcccccgcgaccggcacgtacaacctccaggaaatcgtgcccggcagcgtgtggatggagagggacgtgtacctccaaggacccatctgggccaagatcccagagacgggggcgcactttcacccctctccggccatgggcggattcggactcaaacacccaccgcccatgatgctcatcaagaacacgcctgtgcccggaaatatcaccagcttctcggacgtgcccgtcagcagcttcatcacccagtacagcaccgggcaggtcaccgtggagatggagtgggagctcaagaaggaaaactccaagaggtggaacccagagatccagtacacaaacaactacaacgacccccagtttgtggactttgccccggacagcaccggggaatacagaagcaccagacctatcggaacccgataccttacccgacccctttaa

SEQ ID NO: 82 - protein, 588 aa, synthetic construct
TAPTGKRIDDHFPKRKKARTEEDSKPSTSSDAEAGPSGSQQLQIPAQPASSLGADTMSAGGGGPLGDNNQGADGVGNASGDWHCDSTWMGDRVVTKSTRTWVLPSYNNHQYREIKSGSVDGSNANAYFGYSTPWGYFDFNRFHSHWSPRDWQRLINNYWGFRPRSLRVKIFNIQVKEVTVQDSTTTIANNLTSTVQVFTDDDYQLPYVVGNGTEGCLPAFPPQVFTLPQYGYATLNRDNTENPTERSSFFCLEYFPSKMLRTGNNFEFTYNFEEVPFHSSFAPSQNLFKLANPLVDQYLYRFVSTNNTGGVQFNKNLAGRYANTYKNWFTGPMGRTQGWNLGSGVNRASVSAFATTNRMELEGASYQVPPQPNGMTNNLQGSNTYALENTMIFNSQPANPGTTATYLEGNMLITSESETQPVNRVAYNVGGQMATNNQSSTTAPATGTYNLQEIVPGSVWMERDVYLQGPIWAKIPETGAHFHPSPAMGGFGLKHPPPMMLIKNTPVPGNITSFSDVPVSSFITQYSTGQVTVEMEWELKKENSKRWNPEIQYTNNYNDPQFVDFAPDSTGEYRSTRPIGTRYLTRPL

SEQ ID NO: 83 - DNA, 1599 bp, synthetic construct
  source 1..1599: mol_type = other DNA
atgtctgcgggaggtggcggcccattgggcgacaataaccaaggtgccgatggagtgggcaatgcctcgggagattggcattgcgattccacgtggatgggggacagagtcgtcaccaagtccacccgaacctgggtgctgcccagctacaacaaccaccagtaccgagagatcaaaagcggctccgtcgacggaagcaacgccaacgcctactttggatacagcaccccctgggggtactttgactttaaccgcttccacagccactggagcccccgagactggcaaagactcatcaacaactactggggcttcagaccccggtccctcagagtcaaaatcttcaacattcaagtcaaagaggtcacggtgcaggactccaccaccaccatcgccaacaacctcacctccaccgtccaagtgtttacggacgacgactaccagctgccctacgtcgtcggcaacgggaccgagggatgcctgccggccttccctccgcaggtctttacgctgccgcagtacggttacgcgacgctgaaccgcgacaacacagaaaatcccaccgagaggagcagcttcttctgcctagagtactttcccagcaagatgctgagaacgggcaacaactttgagtttacctacaactttgaggaggtgcccttccactccagcttcgctcccagtcagaacctcttcaagctggccaacccgctggtggaccagtacttgtaccgcttcgtgagcacaaataacactggcggagtccagttcaacaagaacctggccgggagatacgccaacacctacaaaaactggttcaccgggcccatgggccgaacccagggctggaacctgggctccggggtcaaccgcgccagtgtcagcgccttcgccacgaccaataggatggagctcgagggcgcgagttaccaggtgcccccgcagccgaacggcatgaccaacaacctccagggcagcaacacctatgccctggagaacactatgatcttcaacagccagccggcgaacccgggcaccaccgccacgtacctcgagggcaacatgctcatcaccagcgagagcgagacgcagccggtgaaccgcgtggcgtacaacgtcggcgggcagatggccaccaacaaccagagctccaccactgcccccgcgaccggcacgtacaacctccaggaaatcgtgcccggcagcgtgtggatggagagggacgtgtacctccaaggacccatctgggccaagatcccagagacgggggcgcactttcacccctctccggccatgggcggattcggactcaaacacccaccgcccatgatgctcatcaagaacacgcctgtgcccggaaatatcaccagcttctcggacgtgcccgtcagcagcttcatcacccagtacagcaccgggcaggtcaccgtggagatggagtgggagctcaagaaggaaaactccaagaggtggaacccagagatccagtacacaaacaactacaacgacccccagtttgtggactttgccccggacagcaccggggaatacagaagcaccagacctatcggaacccgataccttacccgacccctttaa

SEQ ID NO: 84 - protein, 532 aa, synthetic construct
MSAGGGGPLGDNNQGADGVGNASGDWHCDSTWMGDRVVTKSTRTWVLPSYNNHQYREIKSGSVDGSNANAYFGYSTPWGYFDFNRFHSHWSPRDWQRLINNYWGFRPRSLRVKIFNIQVKEVTVQDSTTTIANNLTSTVQVFTDDDYQLPYVVGNGTEGCLPAFPPQVFTLPQYGYATLNRDNTENPTERSSFFCLEYFPSKMLRTGNNFEFTYNFEEVPFHSSFAPSQNLFKLANPLVDQYLYRFVSTNNTGGVQFNKNLAGRYANTYKNWFTGPMGRTQGWNLGSGVNRASVSAFATTNRMELEGASYQVPPQPNGMTNNLQGSNTYALENTMIFNSQPANPGTTATYLEGNMLITSESETQPVNRVAYNVGGQMATNNQSSTTAPATGTYNLQEIVPGSVWMERDVYLQGPIWAKIPETGAHFHPSPAMGGFGLKHPPPMMLIKNTPVPGNITSFSDVPVSSFITQYSTGQVTVEMEWELKKENSKRWNPEIQYTNNYNDPQFVDFAPDSTGEYRSTRPIGTRYLTRPL

SEQ ID NO: 85 - DNA, 2175 bp, synthetic construct
  source 1..2175: mol_type = other DNA
atgtcttttgttgatcaccctccagattggttggaagaagttggtgaaggtcttcgcgagtttttgggccttgaagcgggcccaccgaaaccaaaacccaatcagcagcatcaagatcaagcccgtggtcttgtgctgcctggttataactatctcggacccggaaacggtctcgatcgaggagagcctgtcaacagggcagacgaggtcgcgcgagagcacgacatctcgtacaacgagcagcttgaggcgggagacaacccctacctcaagtacaaccacgcggacgccgagtttcaggagaagctcgccgacgacacatccttcgggggaaacctcggaaaggcagtctttcaggccaagaaaagggttctcgaaccttttggcctggttgaagagggtgctaagacggcccctaccggaaagcggatagacgaccactttccaaaaagaaagaaggctcggaccgaagaggactccaagccttccacctcgtcagacgccgaagctggacccagcggatcccagcagctgcaaatcccagcccaaccagcctcaagtttgggagctgatacaatgtctgcgggaggtggcggcccattgggcgacaataaccaaggtgccgatggagtgggcaatgcctcgggagattggcattgcgattccacgtggatgggggacagagtcgtcaccaagtccacccgaacctgggtgctgcccagctacaacaaccaccagtaccgagagatcaaaagcggctccgtcgacggaagcaacgccaacgcctactttggatacagcaccccctgggggtactttgactttaaccgcttccacagccactggagcccccgagactggcaaagactcatcaacaactactggggcttcagaccccggtccctcagagtcaaaatcttcaacattcaagtcaaagaggtcacggtgcaggactccaccaccaccatcgccaacaacctcacctccaccgtccaagtgtttacggacgacgactaccagctgccctacgtcgtcggcaacgggaccgagggatgcctgccggccttccctccgcaggtctttacgctgccgcagtacggttacgcgacgctgaaccgcgacaacacagaaaatcccaccgagaggagcagcttcttctgcctagagtactttcccagcaagatgctgagaacgggcaacaactttgagtttacctacaactttgaggaggtgcccttccactccagcttcgctcccagtcagaacctcttcaagctggccaacccgctggtggaccagtacttgtaccgcttcgtgagcacaaataacactggcggagtccagttcaacaagaacctggccgggagatacgccaacacctacaaaaactggttcccggggcccatgggccgaacccagggctggaacctgggctccggggtcaaccgcgccagtgtcagcgccttcgccacgaccaataggatggagctcgagggcgcgagttaccaggtgcccccgcagccgaacggcatgaccaacaacctccagggcagcaacacctatgccctggagaacactatgatcttcaacagccagccggcgaacccgggcaccaccgccacgtacctcgagggcaacatgctcatcaccagcgagagcgagacgcagccggtgaaccgcgtggcgtacaacgtcggcgggcagatggccaccaacaaccagagctccaccactgcccccgcgaccggcacgtacaacctccaggaaatcgtgcccggccaggtgtggatggagagggacgtgtacctccaaggacccatctgggccaagatcccagagacgggggcgcactttcacccctctccggccatgggcggattcggactcaaacacccaccgcccatgatgctcatcaagaacacgcctgtgcccggaaatatcaccagcttctcggacgtgcccgtcagcagcttcatcacccagtacagcaccgggcaggtcaccgtggagatggagtgggagctcaagaaggaaaactccaagaggtggaacccagagatccagtacacaaacaactacaacgacccccagtttgtggactttgccccggacagcaccggggaatacagaaccaccagacctatcggaacccgataccttacccgacccctttaa

SEQ ID NO: 86 - protein, 724 aa, synthetic construct
MSFVDHPPDWLEEVGEGLREFLGLEAGPPKPKPNQQHQDQARGLVLPGYNYLGPGNGLDRGEPVNRADEVAREHDISYNEQLEAGDNPYLKYNHADAEFQEKLADDTSFGGNLGKAVFQAKKRVLEPFGLVEEGAKTAPTGKRIDDHFPKRKKARTEEDSKPSTSSDAEAGPSGSQQLQIPAQPASSLGADTMSAGGGGPLGDNNQGADGVGNASGDWHCDSTWMGDRVVTKSTRTWVLPSYNNHQYREIKSGSVDGSNANAYFGYSTPWGYFDFNRFHSHWSPRDWQRLINNYWGFRPRSLRVKIFNIQVKEVTVQDSTTTIANNLTSTVQVFTDDDYQLPYVVGNGTEGCLPAFPPQVFTLPQYGYATLNRDNTENPTERSSFFCLEYFPSKMLRTGNNFEFTYNFEEVPFHSSFAPSQNLFKLANPLVDQYLYRFVSTNNTGGVQFNKNLAGRYANTYKNWFPGPMGRTQGWNLGSGVNRASVSAFATTNRMELEGASYQVPPQPNGMTNNLQGSNTYALENTMIFNSQPANPGTTATYLEGNMLITSESETQPVNRVAYNVGGQMATNNQSSTTAPATGTYNLQEIVPGQVWMERDVYLQGPIWAKIPETGAHFHPSPAMGGFGLKHPPPMMLIKNTPVPGNITSFSDVPVSSFITQYSTGQVTVEMEWELKKENSKRWNPEIQYTNNYNDPQFVDFAPDSTGEYRTTRPIGTRYLTRPL

SEQ ID NO: 87 - DNA, 1767 bp, synthetic construct
  source 1..1767: mol_type = other DNA
acggcccctaccggaaagcggatagacgaccactttccaaaaagaaagaaggctcggaccgaagaggactccaagccttccacctcgtcagacgccgaagctggacccagcggatcccagcagctgcaaatcccagcccaaccagcctcaagtttgggagctgatacaatgtctgcgggaggtggcggcccattgggcgacaataaccaaggtgccgatggagtgggcaatgcctcgggagattggcattgcgattccacgtggatgggggacagagtcgtcaccaagtccacccgaacctgggtgctgcccagctacaacaaccaccagtaccgagagatcaaaagcggctccgtcgacggaagcaacgccaacgcctactttggatacagcaccccctgggggtactttgactttaaccgcttccacagccactggagcccccgagactggcaaagactcatcaacaactactggggcttcagaccccggtccctcagagtcaaaatcttcaacattcaagtcaaagaggtcacggtgcaggactccaccaccaccatcgccaacaacctcacctccaccgtccaagtgtttacggacgacgactaccagctgccctacgtcgtcggcaacgggaccgagggatgcctgccggccttccctccgcaggtctttacgctgccgcagtacggttacgcgacgctgaaccgcgacaacacagaaaatcccaccgagaggagcagcttcttctgcctagagtactttcccagcaagatgctgagaacgggcaacaactttgagtttacctacaactttgaggaggtgcccttccactccagcttcgctcccagtcagaacctcttcaagctggccaacccgctggtggaccagtacttgtaccgcttcgtgagcacaaataacactggcggagtccagttcaacaagaacctggccgggagatacgccaacacctacaaaaactggttcccggggcccatgggccgaacccagggctggaacctgggctccggggtcaaccgcgccagtgtcagcgccttcgccacgaccaataggatggagctcgagggcgcgagttaccaggtgcccccgcagccgaacggcatgaccaacaacctccagggcagcaacacctatgccctggagaacactatgatcttcaacagccagccggcgaacccgggcaccaccgccacgtacctcgagggcaacatgctcatcaccagcgagagcgagacgcagccggtgaaccgcgtggcgtacaacgtcggcgggcagatggccaccaacaaccagagctccaccactgcccccgcgaccggcacgtacaacctccaggaaatcgtgcccggccaggtgtggatggagagggacgtgtacctccaaggacccatctgggccaagatcccagagacgggggcgcactttcacccctctccggccatgggcggattcggactcaaacacccaccgcccatgatgctcatcaagaacacgcctgtgcccggaaatatcaccagcttctcggacgtgcccgtcagcagcttcatcacccagtacagcaccgggcaggtcaccgtggagatggagtgggagctcaagaaggaaaactccaagaggtggaacccagagatccagtacacaaacaactacaacgacccccagtttgtggactttgccccggacagcaccggggaatacagaaccaccagacctatcggaacccgataccttacccgacccctttaa

SEQ ID NO: 88 - protein, 588 aa, synthetic construct
TAPTGKRIDDHFPKRKKARTEEDSKPSTSSDAEAGPSGSQQLQIPAQPASSLGADTMSAGGGGPLGDNNQGADGVGNASGDWHCDSTWMGDRVVTKSTRTWVLPSYNNHQYREIKSGSVDGSNANAYFGYSTPWGYFDFNRFHSHWSPRDWQRLINNYWGFRPRSLRVKIFNIQVKEVTVQDSTTTIANNLTSTVQVFTDDDYQLPYVVGNGTEGCLPAFPPQVFTLPQYGYATLNRDNTENPTERSSFFCLEYFPSKMLRTGNNFEFTYNFEEVPFHSSFAPSQNLFKLANPLVDQYLYRFVSTNNTGGVQFNKNLAGRYANTYKNWFPGPMGRTQGWNLGSGVNRASVSAFATTNRMELEGASYQVPPQPNGMTNNLQGSNTYALENTMIFNSQPANPGTTATYLEGNMLITSESETQPVNRVAYNVGGQMATNNQSSTTAPATGTYNLQEIVPGQVWMERDVYLQGPIWAKIPETGAHFHPSPAMGGFGLKHPPPMMLIKNTPVPGNITSFSDVPVSSFITQYSTGQVTVEMEWELKKENSKRWNPEIQYTNNYNDPQFVDFAPDSTGEYRTTRPIGTRYLTRPL

SEQ ID NO: 89 - DNA, 1599 bp, synthetic construct
  source 1..1599: mol_type = other DNA
atgtctgcgggaggtggcggcccattgggcgacaataaccaaggtgccgatggagtgggcaatgcctcgggagattggcattgcgattccacgtggatgggggacagagtcgtcaccaagtccacccgaacctgggtgctgcccagctacaacaaccaccagtaccgagagatcaaaagcggctccgtcgacggaagcaacgccaacgcctactttggatacagcaccccctgggggtactttgactttaaccgcttccacagccactggagcccccgagactggcaaagactcatcaacaactactggggcttcagaccccggtccctcagagtcaaaatcttcaacattcaagtcaaagaggtcacggtgcaggactccaccaccaccatcgccaacaacctcacctccaccgtccaagtgtttacggacgacgactaccagctgccctacgtcgtcggcaacgggaccgagggatgcctgccggccttccctccgcaggtctttacgctgccgcagtacggttacgcgacgctgaaccgcgacaacacagaaaatcccaccgagaggagcagcttcttctgcctagagtactttcccagcaagatgctgagaacgggcaacaactttgagtttacctacaactttgaggaggtgcccttccactccagcttcgctcccagtcagaacctcttcaagctggccaacccgctggtggaccagtacttgtaccgcttcgtgagcacaaataacactggcggagtccagttcaacaagaacctggccgggagatacgccaacacctacaaaaactggttcccggggcccatgggccgaacccagggctggaacctgggctccggggtcaaccgcgccagtgtcagcgccttcgccacgaccaataggatggagctcgagggcgcgagttaccaggtgcccccgcagccgaacggcatgaccaacaacctccagggcagcaacacctatgccctggagaacactatgatcttcaacagccagccggcgaacccgggcaccaccgccacgtacctcgagggcaacatgctcatcaccagcgagagcgagacgcagccggtgaaccgcgtggcgtacaacgtcggcgggcagatggccaccaacaaccagagctccaccactgcccccgcgaccggcacgtacaacctccaggaaatcgtgcccggccaggtgtggatggagagggacgtgtacctccaaggacccatctgggccaagatcccagagacgggggcgcactttcacccctctccggccatgggcggattcggactcaaacacccaccgcccatgatgctcatcaagaacacgcctgtgcccggaaatatcaccagcttctcggacgtgcccgtcagcagcttcatcacccagtacagcaccgggcaggtcaccgtggagatggagtgggagctcaagaaggaaaactccaagaggtggaacccagagatccagtacacaaacaactacaacgacccccagtttgtggactttgccccggacagcaccggggaatacagaaccaccagacctatcggaacccgataccttacccgacccctttaa

SEQ ID NO: 90 - protein, 532 aa, synthetic construct
MSAGGGGPLGDNNQGADGVGNASGDWHCDSTWMGDRVVTKSTRTWVLPSYNNHQYREIKSGSVDGSNANAYFGYSTPWGYFDFNRFHSHWSPRDWQRLINNYWGFRPRSLRVKIFNIQVKEVTVQDSTTTIANNLTSTVQVFTDDDYQLPYVVGNGTEGCLPAFPPQVFTLPQYGYATLNRDNTENPTERSSFFCLEYFPSKMLRTGNNFEFTYNFEEVPFHSSFAPSQNLFKLANPLVDQYLYRFVSTNNTGGVQFNKNLAGRYANTYKNWFPGPMGRTQGWNLGSGVNRASVSAFATTNRMELEGASYQVPPQPNGMTNNLQGSNTYALENTMIFNSQPANPGTTATYLEGNMLITSESETQPVNRVAYNVGGQMATNNQSSTTAPATGTYNLQEIVPGQVWMERDVYLQGPIWAKIPETGAHFHPSPAMGGFGLKHPPPMMLIKNTPVPGNITSFSDVPVSSFITQYSTGQVTVEMEWELKKENSKRWNPEIQYTNNYNDPQFVDFAPDSTGEYRTTRPIGTRYLTRPL

SEQ ID NO: 91 - DNA, 2175 bp, synthetic construct
  source 1..2175: mol_type = other DNA
atggcttttgttgatcaccctccagattggttggaagaagttggtgaaggtcttcgcgagtttttgggccttgaagcgggcccaccgaaaccaaaacccaatcagcagcatcaagatcaagcccgtggtcttgtgctgcctggttataactatctcggacccggaaacggtctcgatcgaggagagcctgtcaacagggcagacgaggtcgcgcgagagcacgacatctcgtacaacgagcagcttgaggcgggagacaacccctacctcaagtacaaccacgcggacgccgagtttcaggagaagctcgccgacgacacatccttcgggggaaacctcggaaaggcagtctttcaggccaagaaaagggttctcgaaccttttggcctggttgaagagggtgctaagacggcccctaccggaaagcggatagacgaccactttccaaaaagaaagaaggctcggaccgaagaggactccaagccttccacctcgtcagacgccgaagctggacccagcggatcccagcagctgcaaatcccagcccaaccagcctcaagtttgggagctgatacaatgtctgcgggaggtggcggcccattgggcgacaataaccaaggtgccgatggagtgggcaatgcctcgggagattggcattgcgattccacgtggatgggggacagagtcgtcaccaagtccacccgaacctgggtgctgcccagctacaacaaccaccagtaccgagagatcaaaagcggctccgtcgacggaagcaacgccaacgcctactttggatacagcaccccctgggggtactttgactttaaccgcttccacagccactggagcccccgagactggcaaagactcatcaacaactactggggcttcagaccccggtccctcagagtcaaaatcttcaacattcaagtcaaagaggtcacggtgcaggactccaccaccaccatcgccaacaacctcacctccaccgtccaagtgtttacggacgacgactaccagctgccctacgtcgtcggcaacgggaccgagggatgcctgccggccttccctccgcaggtctttacgctgccgcagtacggttacgcgacgctgaaccgcgacaacacagaaaatcccaccgagaggagcagcttcttctgcctagagtactttcccagcaagatgctgagaacgggcaacaactttgagtttacctacaactttgaggaggtgcccttccactccagcttcgctcccagtcagaacctcttcaagctggccaacccgctggtggaccagtacttgtaccgcttcgtgagcacaaataacactggcggagtccagttcaacaagaacctggccgggagatacgccaacacctacaaaaactggttcccggggcccatgggccgaacccagggctggaacctgggctccggggtcaaccgcgccagtgtcagcgccttcgccacgaccaataggatggagctcgagggcgcgagttaccaggtgcccccgcagccgaacggcatgaccaacaacctccagggcagcaacacctatgccctggagaacactatgatcttcaacagccagccggcgaacccgggcaccaccgccacgtacctcgagggcaacatgctcatcaccagcgagagcgagacgcagccggtgaaccgcgtggcgtacaacgtcggcgggcagatggccaccaacaaccagagctccaccactgcccccgcgaccggcacgtacaacctccaggaaatcgtgcccggccaggtgtggatggagagggacgtgtacctccaaggacccatctgggccaagatcccagagacgggggcgcactttcacccctctccggccatgggcggattcggactcaaacacccaccgcccatgatgctcatcaagaacacgcctgtgcccggaaatatcaccagcttctcggacgtgcccgtcagcagcttcatcacccagtacagcaccgggcaggtcaccgtggagatggagtgggagctcaagaaggaaaactccaagaggtggaacccagagatccagtacacaaacaactacaacgacccccagtttgtggactttgccccggacagcaccggggaatacagaagcaccagacctatcggaacccgataccttacccgacccctttaa

SEQ ID NO: 92 - protein, 724 aa, synthetic construct
MAFVDHPPDWLEEVGEGLREFLGLEAGPPKPKPNQQHQDQARGLVLPGYNYLGPGNGLDRGEPVNRADEVAREHDISYNEQLEAGDNPYLKYNHADAEFQEKLADDTSFGGNLGKAVFQAKKRVLEPFGLVEEGAKTAPTGKRIDDHFPKRKKARTEEDSKPSTSSDAEAGPSGSQQLQIPAQPASSLGADTMSAGGGGPLGDNNQGADGVGNASGDWHCDSTWMGDRVVTKSTRTWVLPSYNNHQYREIKSGSVDGSNANAYFGYSTPWGYFDFNRFHSHWSPRDWQRLINNYWGFRPRSLRVKIFNIQVKEVTVQDSTTTIANNLTSTVQVFTDDDYQLPYVVGNGTEGCLPAFPPQVFTLPQYGYATLNRDNTENPTERSSFFCLEYFPSKMLRTGNNFEFTYNFEEVPFHSSFAPSQNLFKLANPLVDQYLYRFVSTNNTGGVQFNKNLAGRYANTYKNWFPGPMGRTQGWNLGSGVNRASVSAFATTNRMELEGASYQVPPQPNGMTNNLQGSNTYALENTMIFNSQPANPGTTATYLEGNMLITSESETQPVNRVAYNVGGQMATNNQSSTTAPATGTYNLQEIVPGQVWMERDVYLQGPIWAKIPETGAHFHPSPAMGGFGLKHPPPMMLIKNTPVPGNITSFSDVPVSSFITQYSTGQVTVEMEWELKKENSKRWNPEIQYTNNYNDPQFVDFAPDSTGEYRSTRPIGTRYLTRPL

SEQ ID NO: 93 - DNA, 1767 bp, synthetic construct
  source 1..1767: mol_type = other DNA
acggcccctaccggaaagcggatagacgaccactttccaaaaagaaagaaggctcggaccgaagaggactccaagccttccacctcgtcagacgccgaagctggacccagcggatcccagcagctgcaaatcccagcccaaccagcctcaagtttgggagctgatacaatgtctgcgggaggtggcggcccattgggcgacaataaccaaggtgccgatggagtgggcaatgcctcgggagattggcattgcgattccacgtggatgggggacagagtcgtcaccaagtccacccgaacctgggtgctgcccagctacaacaaccaccagtaccgagagatcaaaagcggctccgtcgacggaagcaacgccaacgcctactttggatacagcaccccctgggggtactttgactttaaccgcttccacagccactggagcccccgagactggcaaagactcatcaacaactactggggcttcagaccccggtccctcagagtcaaaatcttcaacattcaagtcaaagaggtcacggtgcaggactccaccaccaccatcgccaacaacctcacctccaccgtccaagtgtttacggacgacgactaccagctgccctacgtcgtcggcaacgggaccgagggatgcctgccggccttccctccgcaggtctttacgctgccgcagtacggttacgcgacgctgaaccgcgacaacacagaaaatcccaccgagaggagcagcttcttctgcctagagtactttcccagcaagatgctgagaacgggcaacaactttgagtttacctacaactttgaggaggtgcccttccactccagcttcgctcccagtcagaacctcttcaagctggccaacccgctggtggaccagtacttgtaccgcttcgtgagcacaaataacactggcggagtccagttcaacaagaacctggccgggagatacgccaacacctacaaaaactggttcccggggcccatgggccgaacccagggctggaacctgggctccggggtcaaccgcgccagtgtcagcgccttcgccacgaccaataggatggagctcgagggcgcgagttaccaggtgcccccgcagccgaacggcatgaccaacaacctccagggcagcaacacctatgccctggagaacactatgatcttcaacagccagccggcgaacccgggcaccaccgccacgtacctcgagggcaacatgctcatcaccagcgagagcgagacgcagccggtgaaccgcgtggcgtacaacgtcggcgggcagatggccaccaacaaccagagctccaccactgcccccgcgaccggcacgtacaacctccaggaaatcgtgcccggccaggtgtggatggagagggacgtgtacctccaaggacccatctgggccaagatcccagagacgggggcgcactttcacccctctccggccatgggcggattcggactcaaacacccaccgcccatgatgctcatcaagaacacgcctgtgcccggaaatatcaccagcttctcggacgtgcccgtcagcagcttcatcacccagtacagcaccgggcaggtcaccgtggagatggagtgggagctcaagaaggaaaactccaagaggtggaacccagagatccagtacacaaacaactacaacgacccccagtttgtggactttgccccggacagcaccggggaatacagaagcaccagacctatcggaacccgataccttacccgacccctttaa

SEQ ID NO: 94 - protein, 588 aa, synthetic construct
TAPTGKRIDDHFPKRKKARTEEDSKPSTSSDAEAGPSGSQQLQIPAQPASSLGADTMSAGGGGPLGDNNQGADGVGNASGDWHCDSTWMGDRVVTKSTRTWVLPSYNNHQYREIKSGSVDGSNANAYFGYSTPWGYFDFNRFHSHWSPRDWQRLINNYWGFRPRSLRVKIFNIQVKEVTVQDSTTTIANNLTSTVQVFTDDDYQLPYVVGNGTEGCLPAFPPQVFTLPQYGYATLNRDNTENPTERSSFFCLEYFPSKMLRTGNNFEFTYNFEEVPFHSSFAPSQNLFKLANPLVDQYLYRFVSTNNTGGVQFNKNLAGRYANTYKNWFPGPMGRTQGWNLGSGVNRASVSAFATTNRMELEGASYQVPPQPNGMTNNLQGSNTYALENTMIFNSQPANPGTTATYLEGNMLITSESETQPVNRVAYNVGGQMATNNQSSTTAPATGTYNLQEIVPGQVWMERDVYLQGPIWAKIPETGAHFHPSPAMGGFGLKHPPPMMLIKNTPVPGNITSFSDVPVSSFITQYSTGQVTVEMEWELKKENSKRWNPEIQYTNNYNDPQFVDFAPDSTGEYRSTRPIGTRYLTRPL

SEQ ID NO: 95 - DNA, 1599 bp, synthetic construct
  source 1..1599: mol_type = other DNA
atgtctgcgggaggtggcggcccattgggcgacaataaccaaggtgccgatggagtgggcaatgcctcgggagattggcattgcgattccacgtggatgggggacagagtcgtcaccaagtccacccgaacctgggtgctgcccagctacaacaaccaccagtaccgagagatcaaaagcggctccgtcgacggaagcaacgccaacgcctactttggatacagcaccccctgggggtactttgactttaaccgcttccacagccactggagcccccgagactggcaaagactcatcaacaactactggggcttcagaccccggtccctcagagtcaaaatcttcaacattcaagtcaaagaggtcacggtgcaggactccaccaccaccatcgccaacaacctcacctccaccgtccaagtgtttacggacgacgactaccagctgccctacgtcgtcggcaacgggaccgagggatgcctgccggccttccctccgcaggtctttacgctgccgcagtacggttacgcgacgctgaaccgcgacaacacagaaaatcccaccgagaggagcagcttcttctgcctagagtactttcccagcaagatgctgagaacgggcaacaactttgagtttacctacaactttgaggaggtgcccttccactccagcttcgctcccagtcagaacctcttcaagctggccaacccgctggtggaccagtacttgtaccgcttcgtgagcacaaataacactggcggagtccagttcaacaagaacctggccgggagatacgccaacacctacaaaaactggttcccggggcccatgggccgaacccagggctggaacctgggctccggggtcaaccgcgccagtgtcagcgccttcgccacgaccaataggatggagctcgagggcgcgagttaccaggtgcccccgcagccgaacggcatgaccaacaacctccagggcagcaacacctatgccctggagaacactatgatcttcaacagccagccggcgaacccgggcaccaccgccacgtacctcgagggcaacatgctcatcaccagcgagagcgagacgcagccggtgaaccgcgtggcgtacaacgtcggcgggcagatggccaccaacaaccagagctccaccactgcccccgcgaccggcacgtacaacctccaggaaatcgtgcccggccaggtgtggatggagagggacgtgtacctccaaggacccatctgggccaagatcccagagacgggggcgcactttcacccctctccggccatgggcggattcggactcaaacacccaccgcccatgatgctcatcaagaacacgcctgtgcccggaaatatcaccagcttctcggacgtgcccgtcagcagcttcatcacccagtacagcaccgggcaggtcaccgtggagatggagtgggagctcaagaaggaaaactccaagaggtggaacccagagatccagtacacaaacaactacaacgacccccagtttgtggactttgccccggacagcaccggggaatacagaagcaccagacctatcggaacccgataccttacccgacccctttaa

SEQ ID NO: 96 - protein, 532 aa, synthetic construct
MSAGGGGPLGDNNQGADGVGNASGDWHCDSTWMGDRVVTKSTRTWVLPSYNNHQYREIKSGSVDGSNANAYFGYSTPWGYFDFNRFHSHWSPRDWQRLINNYWGFRPRSLRVKIFNIQVKEVTVQDSTTTIANNLTSTVQVFTDDDYQLPYVVGNGTEGCLPAFPPQVFTLPQYGYATLNRDNTENPTERSSFFCLEYFPSKMLRTGNNFEFTYNFEEVPFHSSFAPSQNLFKLANPLVDQYLYRFVSTNNTGGVQFNKNLAGRYANTYKNWFPGPMGRTQGWNLGSGVNRASVSAFATTNRMELEGASYQVPPQPNGMTNNLQGSNTYALENTMIFNSQPANPGTTATYLEGNMLITSESETQPVNRVAYNVGGQMATNNQSSTTAPATGTYNLQEIVPGQVWMERDVYLQGPIWAKIPETGAHFHPSPAMGGFGLKHPPPMMLIKNTPVPGNITSFSDVPVSSFITQYSTGQVTVEMEWELKKENSKRWNPEIQYTNNYNDPQFVDFAPDSTGEYRSTRPIGTRYLTRPL

SEQ ID NO: 97 - DNA, 2175 bp, synthetic construct
  source 1..2175: mol_type = other DNA
atgtcttttgttgatcaccctccagattggttggaagaagttggtgaaggtcttcgcgagtttttgggccttgaagcgggcccaccgaaaccaaaacccaatcagcagcatcaagatcaagcccgtggtcttgtgctgcctggttataactatctcggacccggaaacggtctcgatcgaggagagcctgtcaacagggcagacgaggtcgcgcgagagcacgacatctcgtacaacgagcagcttgaggcgggagacaacccctacctcaagtacaaccacgcggacgccgagtttcaggagaagctcgccgacgacacatccttcgggggaaacctcggaaaggcagtctttcaggccaagaaaagggttctcgaaccttttggcctggttgaagagggtgctaagacggcccctaccggaaagcggatagacgaccactttccaaaaagaaagaaggctcggaccgaagaggactccaagccttccacctcgtcagacgccgaagctggacccagcggatcccagcagctgcaaatcccagcccaaccagcctcaagtttgggagctgatacaatgtctgcgggaggtggcggcccattgggcgacaataaccaaggtgccgatggagtgggcaatgcctcgggagattggcattgcgattccacgtggatgggggacagagtcgtcaccaagtccacccgaacctgggtgctgcccagctacaacaaccaccagtaccgagagatcaaaagcggctccgtcgacggaagcaacgccaacgcctactttggatacagcaccccctgggggtactttgactttaaccgcttccacagccactggagcccccgagactggcaaagactcatcaacaactactggggcttcagaccccggtccctcagagtcaaaatcttcaacattcaagtcaaagaggtcacggtgcaggactccaccaccaccatcgccaacaacctcacctccaccgtccaagtgtttacggacgacgactaccagctgccctacgtcgtcggcaacgggaccgagggatgcctgccggccttccctccgcaggtctttacgctgccgcagtacggttacgcgacgctgaaccgcgacaacacagaaaatcccaccgagaggagcagcttcttctgcctagagtactttcccagcaagatgctgagaacgggcaacaactttgagtttacctacaactttgaggaggtgcccttccactccagcttcgctcccagtcagaacctcttcaagctggccaacccgctggtggaccagtacttgtaccgcttcgtgagcacaaataacactggcggagtccagttcaacaagaacctggccgggagatacgccaacacctacaaaaactggttcccggggcccatgggccgaacccagggctggaacctgggctccggggtcaaccgcgccagtgtcagcgccttcgccacgaccaataggatggagctcgagggcgcgagttaccaggtgcccccgcagccgaacggcatgaccaacaacctccagggcagcaacacctatgccctggagaacactatgatcttcaacagccagccggcgaacccgggcaccaccgccacgtacctcgagggcaacatgctcatcaccagcgagagcgagacgcagccggtgaaccgcgtggcgtacaacgtcggcgggcagatggccaccaacaaccagagctccaccactgcccccgcgaccggcacgtacaacctccaggaaatcgtgcccggcagcgtgtggatggagagggacgtgtacctccaaggacccatctgggccaagatcccagagctcggggcgcactttcacccctctccggccatgggcggattcggactcaaacacccaccgcccatgatgctcatcaagaacacgcctgtgcccggaaatatcaccagcttctcggacgtgcccgtcagcagcttcatcacccagtacagcaccgggcaggtcaccgtggagatggagtgggagctcaagaaggaaaactccaagaggtggaacccagagatccagtacacaaacaactacaacgacccccagtttgtggactttgccccggacagcaccggggaatacagaaccaccagacctatcggaacccgataccttacccgacccctttaa

SEQ ID NO: 98 - protein, 724 aa, synthetic construct
MSFVDHPPDWLEEVGEGLREFLGLEAGPPKPKPNQQHQDQARGLVLPGYNYLGPGNGLDRGEPVNRADEVAREHDISYNEQLEAGDNPYLKYNHADAEFQEKLADDTSFGGNLGKAVFQAKKRVLEPFGLVEEGAKTAPTGKRIDDHFPKRKKARTEEDSKPSTSSDAEAGPSGSQQLQIPAQPASSLGADTMSAGGGGPLGDNNQGADGVGNASGDWHCDSTWMGDRVVTKSTRTWVLPSYNNHQYREIKSGSVDGSNANAYFGYSTPWGYFDFNRFHSHWSPRDWQRLINNYWGFRPRSLRVKIFNIQVKEVTVQDSTTTIANNLTSTVQVFTDDDYQLPYVVGNGTEGCLPAFPPQVFTLPQYGYATLNRDNTENPTERSSFFCLEYFPSKMLRTGNNFEFTYNFEEVPFHSSFAPSQNLFKLANPLVDQYLYRFVSTNNTGGVQFNKNLAGRYANTYKNWFPGPMGRTQGWNLGSGVNRASVSAFATTNRMELEGASYQVPPQPNGMTNNLQGSNTYALENTMIFNSQPANPGTTATYLEGNMLITSESETQPVNRVAYNVGGQMATNNQSSTTAPATGTYNLQEIVPGSVWMERDVYLQGPIWAKIPELGAHFHPSPAMGGFGLKHPPPMMLIKNTPVPGNITSFSDVPVSSFITQYSTGQVTVEMEWELKKENSKRWNPEIQYTNNYNDPQFVDFAPDSTGEYRTTRPIGTRYLTRPL

SEQ ID NO: 99 - DNA, 1767 bp, synthetic construct
  source 1..1767: mol_type = other DNA
acggcccctaccggaaagcggatagacgaccactttccaaaaagaaagaaggctcggaccgaagaggactccaagccttccacctcgtcagacgccgaagctggacccagcggatcccagcagctgcaaatcccagcccaaccagcctcaagtttgggagctgatacaatgtctgcgggaggtggcggcccattgggcgacaataaccaaggtgccgatggagtgggcaatgcctcgggagattggcattgcgattccacgtggatgggggacagagtcgtcaccaagtccacccgaacctgggtgctgcccagctacaacaaccaccagtaccgagagatcaaaagcggctccgtcgacggaagcaacgccaacgcctactttggatacagcaccccctgggggtactttgactttaaccgcttccacagccactggagcccccgagactggcaaagactcatcaacaactactggggcttcagaccccggtccctcagagtcaaaatcttcaacattcaagtcaaagaggtcacggtgcaggactccaccaccaccatcgccaacaacctcacctccaccgtccaagtgtttacggacgacgactaccagctgccctacgtcgtcggcaacgggaccgagggatgcctgccggccttccctccgcaggtctttacgctgccgcagtacggttacgcgacgctgaaccgcgacaacacagaaaatcccaccgagaggagcagcttcttctgcctagagtactttcccagcaagatgctgagaacgggcaacaactttgagtttacctacaactttgaggaggtgcccttccactccagcttcgctcccagtcagaacctcttcaagctggccaacccgctggtggaccagtacttgtaccgcttcgtgagcacaaataacactggcggagtccagttcaacaagaacctggccgggagatacgccaacacctacaaaaactggttcccggggcccatgggccgaacccagggctggaacctgggctccggggtcaaccgcgccagtgtcagcgccttcgccacgaccaataggatggagctcgagggcgcgagttaccaggtgcccccgcagccgaacggcatgaccaacaacctccagggcagcaacacctatgccctggagaacactatgatcttcaacagccagccggcgaacccgggcaccaccgccacgtacctcgagggcaacatgctcatcaccagcgagagcgagacgcagccggtgaaccgcgtggcgtacaacgtcggcgggcagatggccaccaacaaccagagctccaccactgcccccgcgaccggcacgtacaacctccaggaaatcgtgcccggcagcgtgtggatggagagggacgtgtacctccaaggacccatctgggccaagatcccagagctcggggcgcactttcacccctctccggccatgggcggattcggactcaaacacccaccgcccatgatgctcatcaagaacacgcctgtgcccggaaatatcaccagcttctcggacgtgcccgtcagcagcttcatcacccagtacagcaccgggcaggtcaccgtggagatggagtgggagctcaagaaggaaaactccaagaggtggaacccagagatccagtacacaaacaactacaacgacccccagtttgtggactttgccccggacagcaccggggaatacagaaccaccagacctatcggaacccgataccttacccgacccctttaa

SEQ ID NO: 100 - protein, 588 aa, synthetic construct
TAPTGKRIDDHFPKRKKARTEEDSKPSTSSDAEAGPSGSQQLQIPAQPASSLGADTMSAGGGGPLGDNNQGADGVGNASGDWHCDSTWMGDRVVTKSTRTWVLPSYNNHQYREIKSGSVDGSNANAYFGYSTPWGYFDFNRFHSHWSPRDWQRLINNYWGFRPRSLRVKIFNIQVKEVTVQDSTTTIANNLTSTVQVFTDDDYQLPYVVGNGTEGCLPAFPPQVFTLPQYGYATLNRDNTENPTERSSFFCLEYFPSKMLRTGNNFEFTYNFEEVPFHSSFAPSQNLFKLANPLVDQYLYRFVSTNNTGGVQFNKNLAGRYANTYKNWFPGPMGRTQGWNLGSGVNRASVSAFATTNRMELEGASYQVPPQPNGMTNNLQGSNTYALENTMIFNSQPANPGTTATYLEGNMLITSESETQPVNRVAYNVGGQMATNNQSSTTAPATGTYNLQEIVPGSVWMERDVYLQGPIWAKIPELGAHFHPSPAMGGFGLKHPPPMMLIKNTPVPGNITSFSDVPVSSFITQYSTGQVTVEMEWELKKENSKRWNPEIQYTNNYNDPQFVDFAPDSTGEYRTTRPIGTRYLTRPL

SEQ ID NO: 101 - DNA, 1599 bp, synthetic construct
  source 1..1599: mol_type = other DNA
atgtctgcgggaggtggcggcccattgggcgacaataaccaaggtgccgatggagtgggcaatgcctcgggagattggcattgcgattccacgtggatgggggacagagtcgtcaccaagtccacccgaacctgggtgctgcccagctacaacaaccaccagtaccgagagatcaaaagcggctccgtcgacggaagcaacgccaacgcctactttggatacagcaccccctgggggtactttgactttaaccgcttccacagccactggagcccccgagactggcaaagactcatcaacaactactggggcttcagaccccggtccctcagagtcaaaatcttcaacattcaagtcaaagaggtcacggtgcaggactccaccaccaccatcgccaacaacctcacctccaccgtccaagtgtttacggacgacgactaccagctgccctacgtcgtcggcaacgggaccgagggatgcctgccggccttccctccgcaggtctttacgctgccgcagtacggttacgcgacgctgaaccgcgacaacacagaaaatcccaccgagaggagcagcttcttctgcctagagtactttcccagcaagatgctgagaacgggcaacaactttgagtttacctacaactttgaggaggtgcccttccactccagcttcgctcccagtcagaacctcttcaagctggccaacccgctggtggaccagtacttgtaccgcttcgtgagcacaaataacactggcggagtccagttcaacaagaacctggccgggagatacgccaacacctacaaaaactggttcccggggcccatgggccgaacccagggctggaacctgggctccggggtcaaccgcgccagtgtcagcgccttcgccacgaccaataggatggagctcgagggcgcgagttaccaggtgcccccgcagccgaacggcatgaccaacaacctccagggcagcaacacctatgccctggagaacactatgatcttcaacagccagccggcgaacccgggcaccaccgccacgtacctcgagggcaacatgctcatcaccagcgagagcgagacgcagccggtgaaccgcgtggcgtacaacgtcggcgggcagatggccaccaacaaccagagctccaccactgcccccgcgaccggcacgtacaacctccaggaaatcgtgcccggcagcgtgtggatggagagggacgtgtacctccaaggacccatctgggccaagatcccagagctcggggcgcactttcacccctctccggccatgggcggattcggactcaaacacccaccgcccatgatgctcatcaagaacacgcctgtgcccggaaatatcaccagcttctcggacgtgcccgtcagcagcttcatcacccagtacagcaccgggcaggtcaccgtggagatggagtgggagctcaagaaggaaaactccaagaggtggaacccagagatccagtacacaaacaactacaacgacccccagtttgtggactttgccccggacagcaccggggaatacagaaccaccagacctatcggaacccgataccttacccgacccctttaa

SEQ ID NO: 102 - protein, 532 aa, synthetic construct
MSAGGGGPLGDNNQGADGVGNASGDWHCDSTWMGDRVVTKSTRTWVLPSYNNHQYREIKSGSVDGSNANAYFGYSTPWGYFDFNRFHSHWSPRDWQRLINNYWGFRPRSLRVKIFNIQVKEVTVQDSTTTIANNLTSTVQVFTDDDYQLPYVVGNGTEGCLPAFPPQVFTLPQYGYATLNRDNTENPTERSSFFCLEYFPSKMLRTGNNFEFTYNFEEVPFHSSFAPSQNLFKLANPLVDQYLYRFVSTNNTGGVQFNKNLAGRYANTYKNWFPGPMGRTQGWNLGSGVNRASVSAFATTNRMELEGASYQVPPQPNGMTNNLQGSNTYALENTMIFNSQPANPGTTATYLEGNMLITSESETQPVNRVAYNVGGQMATNNQSSTTAPATGTYNLQEIVPGSVWMERDVYLQGPIWAKIPELGAHFHPSPAMGGFGLKHPPPMMLIKNTPVPGNITSFSDVPVSSFITQYSTGQVTVEMEWELKKENSKRWNPEIQYTNNYNDPQFVDFAPDSTGEYRTTRPIGTRYLTRPL

SEQ ID NO: 103 - DNA, 2175 bp, synthetic construct
  source 1..2175: mol_type = other DNA
atggcttttgttgatcaccctccagattggttggaagaagttggtgaaggtcttcgcgagtttttgggccttgaagcgggcccaccgaaaccaaaacccaatcagcagcatcaagatcaagcccgtggtcttgtgctgcctggttataactatctcggacccggaaacggtctcgatcgaggagagcctgtcaacagggcagacgaggtcgcgcgagagcacgacatctcgtacaacgagcagcttgaggcgggagacaacccctacctcaagtacaaccacgcggacgccgagtttcaggagaagctcgccgacgacacatccttcgggggaaacctcggaaaggcagtctttcaggccaagaaaagggttctcgaaccttttggcctggttgaagagggtgctaagacggcccctaccggaaagcggatagacgaccactttccaaaaagaaagaaggctcggaccgaagaggactccaagccttccacctcgtcagacgccgaagctggacccagcggatcccagcagctgcaaatcccagcccaaccagcctcaagtttgggagctgatacaatgtctgcgggaggtggcggcccattgggcgacaataaccaaggtgccgatggagtgggcaatgcctcgggagattggcattgcgattccacgtggatgggggacagagtcgtcaccaagtccacccgaacctgggtgctgcccagctacaacaaccaccagtaccgagagatcaaaagcggctccgtcgacggaagcaacgccaacgcctactttggatacagcaccccctgggggtactttgactttaaccgcttccacagccactggagcccccgagactggcaaagactcatcaacaactactggggcttcagaccccggtccctcagagtcaaaatcttcaacattcaagtcaaagaggtcacggtgcaggactccaccaccaccatcgccaacaacctcacctccaccgtccaagtgtttacggacgacgactaccagctgccctacgtcgtcggcaacgggaccgagggatgcctgccggccttccctccgcaggtctttacgctgccgcagtacggttacgcgacgctgaaccgcgacaacacagaaaatcccaccgagaggagcagcttcttctgcctagagtactttcccagcaagatgctgagaacgggcaacaactttgagtttacctacaactttgaggaggtgcccttccactccagcttcgctcccagtcagaacctcttcaagctggccaacccgctggtggaccagtacttgtaccgcttcgtgagcacaaataacactggcggagtccagttcaacaagaacctggccgggagatacgccaacacctacaaaaactggttcccggggcccatgggccgaacccagggctggaacctgggctccggggtcaaccgcgccagtgtcagcgccttcgccacgaccaataggatggagctcgagggcgcgagttaccaggtgcccccgcagccgaacggcatgaccaacaacctccagggcagcaacacctatgccctggagaacactatgatcttcaacagccagccggcgaacccgggcaccaccgccacgtacctcgagggcaacatgctcatcaccagcgagagcgagacgcagccggtgaaccgcgtggcgtacaacgtcggcgggcagatggccaccaacaaccagagctccaccactgcccccgcgaccggcacgtacaacctccaggaaatcgtgcccggcagcgtgtggatggagagggacgtgtacctccaaggacccatctgggccaagatcccagagctcggggcgcactttcacccctctccggccatgggcggattcggactcaaacacccaccgcccatgatgctcatcaagaacacgcctgtgcccggaaatatcaccagcttctcggacgtgcccgtcagcagcttcatcacccagtacagcaccgggcaggtcaccgtggagatggagtgggagctcaagaaggaaaactccaagaggtggaacccagagatccagtacacaaacaactacaacgacccccagtttgtggactttgccccggacagcaccggggaatacagaagcaccagacctatcggaacccgataccttacccgacccctttaa

SEQ ID NO: 104 - protein, 724 aa, synthetic construct
MAFVDHPPDWLEEVGEGLREFLGLEAGPPKPKPNQQHQDQARGLVLPGYNYLGPGNGLDRGEPVNRADEVAREHDISYNEQLEAGDNPYLKYNHADAEFQEKLADDTSFGGNLGKAVFQAKKRVLEPFGLVEEGAKTAPTGKRIDDHFPKRKKARTEEDSKPSTSSDAEAGPSGSQQLQIPAQPASSLGADTMSAGGGGPLGDNNQGADGVGNASGDWHCDSTWMGDRVVTKSTRTWVLPSYNNHQYREIKSGSVDGSNANAYFGYSTPWGYFDFNRFHSHWSPRDWQRLINNYWGFRPRSLRVKIFNIQVKEVTVQDSTTTIANNLTSTVQVFTDDDYQLPYVVGNGTEGCLPAFPPQVFTLPQYGYATLNRDNTENPTERSSFFCLEYFPSKMLRTGNNFEFTYNFEEVPFHSSFAPSQNLFKLANPLVDQYLYRFVSTNNTGGVQFNKNLAGRYANTYKNWFPGPMGRTQGWNLGSGVNRASVSAFATTNRMELEGASYQVPPQPNGMTNNLQGSNTYALENTMIFNSQPANPGTTATYLEGNMLITSESETQPVNRVAYNVGGQMATNNQSSTTAPATGTYNLQEIVPGSVWMERDVYLQGPIWAKIPELGAHFHPSPAMGGFGLKHPPPMMLIKNTPVPGNITSFSDVPVSSFITQYSTGQVTVEMEWELKKENSKRWNPEIQYTNNYNDPQFVDFAPDSTGEYRSTRPIGTRYLTRPL

SEQ ID NO: 105 - DNA, 1767 bp, synthetic construct
  source 1..1767: mol_type = other DNA
acggcccctaccggaaagcggatagacgaccactttccaaaaagaaagaaggctcggaccgaagaggactccaagccttccacctcgtcagacgccgaagctggacccagcggatcccagcagctgcaaatcccagcccaaccagcctcaagtttgggagctgatacaatgtctgcgggaggtggcggcccattgggcgacaataaccaaggtgccgatggagtgggcaatgcctcgggagattggcattgcgattccacgtggatgggggacagagtcgtcaccaagtccacccgaacctgggtgctgcccagctacaacaaccaccagtaccgagagatcaaaagcggctccgtcgacggaagcaacgccaacgcctactttggatacagcaccccctgggggtactttgactttaaccgcttccacagccactggagcccccgagactggcaaagactcatcaacaactactggggcttcagaccccggtccctcagagtcaaaatcttcaacattcaagtcaaagaggtcacggtgcaggactccaccaccaccatcgccaacaacctcacctccaccgtccaagtgtttacggacgacgactaccagctgccctacgtcgtcggcaacgggaccgagggatgcctgccggccttccctccgcaggtctttacgctgccgcagtacggttacgcgacgctgaaccgcgacaacacagaaaatcccaccgagaggagcagcttcttctgcctagagtactttcccagcaagatgctgagaacgggcaacaactttgagtttacctacaactttgaggaggtgcccttccactccagcttcgctcccagtcagaacctcttcaagctggccaacccgctggtggaccagtacttgtaccgcttcgtgagcacaaataacactggcggagtccagttcaacaagaacctggccgggagatacgccaacacctacaaaaactggttcccggggcccatgggccgaacccagggctggaacctgggctccggggtcaaccgcgccagtgtcagcgccttcgccacgaccaataggatggagctcgagggcgcgagttaccaggtgcccccgcagccgaacggcatgaccaacaacctccagggcagcaacacctatgccctggagaacactatgatcttcaacagccagccggcgaacccgggcaccaccgccacgtacctcgagggcaacatgctcatcaccagcgagagcgagacgcagccggtgaaccgcgtggcgtacaacgtcggcgggcagatggccaccaacaaccagagctccaccactgcccccgcgaccggcacgtacaacctccaggaaatcgtgcccggcagcgtgtggatggagagggacgtgtacctccaaggacccatctgggccaagatcccagagctcggggcgcactttcacccctctccggccatgggcggattcggactcaaacacccaccgcccatgatgctcatcaagaacacgcctgtgcccggaaatatcaccagcttctcggacgtgcccgtcagcagcttcatcacccagtacagcaccgggcaggtcaccgtggagatggagtgggagctcaagaaggaaaactccaagaggtggaacccagagatccagtacacaaacaactacaacgacccccagtttgtggactttgccccggacagcaccggggaatacagaagcaccagacctatcggaacccgataccttacccgacccctttaa

SEQ ID NO: 106 - protein, 588 aa, synthetic construct
TAPTGKRIDDHFPKRKKARTEEDSKPSTSSDAEAGPSGSQQLQIPAQPASSLGADTMSAGGGGPLGDNNQGADGVGNASGDWHCDSTWMGDRVVTKSTRTWVLPSYNNHQYREIKSGSVDGSNANAYFGYSTPWGYFDFNRFHSHWSPRDWQRLINNYWGFRPRSLRVKIFNIQVKEVTVQDSTTTIANNLTSTVQVFTDDDYQLPYVVGNGTEGCLPAFPPQVFTLPQYGYATLNRDNTENPTERSSFFCLEYFPSKMLRTGNNFEFTYNFEEVPFHSSFAPSQNLFKLANPLVDQYLYRFVSTNNTGGVQFNKNLAGRYANTYKNWFPGPMGRTQGWNLGSGVNRASVSAFATTNRMELEGASYQVPPQPNGMTNNLQGSNTYALENTMIFNSQPANPGTTATYLEGNMLITSESETQPVNRVAYNVGGQMATNNQSSTTAPATGTYNLQEIVPGSVWMERDVYLQGPIWAKIPELGAHFHPSPAMGGFGLKHPPPMMLIKNTPVPGNITSFSDVPVSSFITQYSTGQVTVEMEWELKKENSKRWNPEIQYTNNYNDPQFVDFAPDSTGEYRSTRPIGTRYLTRPL

SEQ ID NO: 107 - DNA, 1599 bp, synthetic construct
  source 1..1599: mol_type = other DNA
atgtctgcgggaggtggcggcccattgggcgacaataaccaaggtgccgatggagtgggcaatgcctcgggagattggcattgcgattccacgtggatgggggacagagtcgtcaccaagtccacccgaacctgggtgctgcccagctacaacaaccaccagtaccgagagatcaaaagcggctccgtcgacggaagcaacgccaacgcctactttggatacagcaccccctgggggtactttgactttaaccgcttccacagccactggagcccccgagactggcaaagactcatcaacaactactggggcttcagaccccggtccctcagagtcaaaatcttcaacattcaagtcaaagaggtcacggtgcaggactccaccaccaccatcgccaacaacctcacctccaccgtccaagtgtttacggacgacgactaccagctgccctacgtcgtcggcaacgggaccgagggatgcctgccggccttccctccgcaggtctttacgctgccgcagtacggttacgcgacgctgaaccgcgacaacacagaaaatcccaccgagaggagcagcttcttctgcctagagtactttcccagcaagatgctgagaacgggcaacaactttgagtttacctacaactttgaggaggtgcccttccactccagcttcgctcccagtcagaacctcttcaagctggccaacccgctggtggaccagtacttgtaccgcttcgtgagcacaaataacactggcggagtccagttcaacaagaacctggccgggagatacgccaacacctacaaaaactggttcccggggcccatgggccgaacccagggctggaacctgggctccggggtcaaccgcgccagtgtcagcgccttcgccacgaccaataggatggagctcgagggcgcgagttaccaggtgcccccgcagccgaacggcatgaccaacaacctccagggcagcaacacctatgccctggagaacactatgatcttcaacagccagccggcgaacccgggcaccaccgccacgtacctcgagggcaacatgctcatcaccagcgagagcgagacgcagccggtgaaccgcgtggcgtacaacgtcggcgggcagatggccaccaacaaccagagctccaccactgcccccgcgaccggcacgtacaacctccaggaaatcgtgcccggcagcgtgtggatggagagggacgtgtacctccaaggacccatctgggccaagatcccagagctcggggcgcactttcacccctctccggccatgggcggattcggactcaaacacccaccgcccatgatgctcatcaagaacacgcctgtgcccggaaatatcaccagcttctcggacgtgcccgtcagcagcttcatcacccagtacagcaccgggcaggtcaccgtggagatggagtgggagctcaagaaggaaaactccaagaggtggaacccagagatccagtacacaaacaactacaacgacccccagtttgtggactttgccccggacagcaccggggaatacagaagcaccagacctatcggaacccgataccttacccgacccctttaa

SEQ ID NO: 108 - protein, 532 aa, synthetic construct
MSAGGGGPLGDNNQGADGVGNASGDWHCDSTWMGDRVVTKSTRTWVLPSYNNHQYREIKSGSVDGSNANAYFGYSTPWGYFDFNRFHSHWSPRDWQRLINNYWGFRPRSLRVKIFNIQVKEVTVQDSTTTIANNLTSTVQVFTDDDYQLPYVVGNGTEGCLPAFPPQVFTLPQYGYATLNRDNTENPTERSSFFCLEYFPSKMLRTGNNFEFTYNFEEVPFHSSFAPSQNLFKLANPLVDQYLYRFVSTNNTGGVQFNKNLAGRYANTYKNWFPGPMGRTQGWNLGSGVNRASVSAFATTNRMELEGASYQVPPQPNGMTNNLQGSNTYALENTMIFNSQPANPGTTATYLEGNMLITSESETQPVNRVAYNVGGQMATNNQSSTTAPATGTYNLQEIVPGSVWMERDVYLQGPIWAKIPELGAHFHPSPAMGGFGLKHPPPMMLIKNTPVPGNITSFSDVPVSSFITQYSTGQVTVEMEWELKKENSKRWNPEIQYTNNYNDPQFVDFAPDSTGEYRSTRPIGTRYLTRPL

SEQ ID NO: 109 - DNA, 2175 bp, synthetic construct
  source 1..2175: mol_type = other DNA
atgtcttttgttgatcaccctccagattggttggaagaagttggtgaaggtcttcgcgagtttttgggccttgaagcgggcccaccgaaaccaaaacccaatcagcagcatcaagatcaagcccgtggtcttgtgctgcctggttataactatctcggacccggaaacggtctcgatcgaggagagcctgtcaacagggcagacgaggtcgcgcgagagcacgacatctcgtacaacgagcagcttgaggcgggagacaacccctacctcaagtacaaccacgcggacgccgagtttcaggagaagctcgccgacgacacatccttcgggggaaacctcggaaaggcagtctttcaggccaagaaaagggttctcgaaccttttggcctggttgaagagggtgctaagacggcccctaccggaaagcggatagacgaccactttccaaaaagaaagaaggctcggaccgaagaggactccaagccttccacctcgtcagacgccgaagctggacccagcggatcccagcagctgcaaatcccagcccaaccagcctcaagtttgggagctgatacaatgtctgcgggaggtggcggcccattgggcgacaataaccaaggtgccgatggagtgggcaatgcctcgggagattggcattgcgattccacgtggatgggggacagagtcgtcaccaagtccacccgaacctgggtgctgcccagctacaacaaccaccagtaccgagagatcaaaagcggctccgtcgacggaagcaacgccaacgcctactttggatacagcaccccctgggggtactttgactttaaccgcttccacagccactggagcccccgagactggcaaagactcatcaacaactactggggcttcagaccccggtccctcagagtcaaaatcttcaacattcaagtcaaagaggtcacggtgcaggactccaccaccaccatcgccaacaacctcacctccaccgtccaagtgtttacggacgacgactaccagctgccctacgtcgtcggcaacgggaccgagggatgcctgccggccttccctccgcaggtctttacgctgccgcagtacggttacgcgacgctgaaccgcgacaacacagaaaatcccaccgagaggagcagcttcttctgcctagagtactttcccagcaagatgctgagaacgggcaacaactttgagtttacctacaactttgaggaggtgcccttccactccagcttcgctcccagtcagaacctcttcaagctggccaacccgctggtggaccagtacttgtaccgcttcgtgagcacaaataacactggcggagtccagttcaacaagaacctggccgggagatacgccaacacctacaaaaactggttcccggggcccatgggccgaacccagggctggaacctgggctccggggtcaaccgcgccagtgtcagcgccttcgccacgaccaataggatggagctcgagggcgcgagttaccaggtgcccccgcagccgaacggcatgaccaacaacctccagggcagcaacacctatgccctggagaacactatgatcttcaacagccagccggcgaacccgggcaccaccgccacgtacctcgagggcaacatgctcatcaccagcgagagcgagacgcagccggtgaaccgcgtggcgtacaacgtcggcgggcagatggccaccaacaaccagagctccaccactgcccccgcgaccggcacgtacaacctccaggaaatcgtgcccggcagcgtgtggatggagagggacgtgtacctccaaggacccatctgggccaagatcccagagacgggggcgcactttcacccctctccggccatgggcggattcggactcaaacacccaccgcccatgatgctcatcaagaacacgcctgtgcccggaaatatcaccagcttctcggacgtgcccgtcagcagcttcatcacccagtacagcaccgggcaggtcaccgtggagatggagtgggagctcaagaaggaaaagtccaagaggtggaacccagagatccagtacacaaacaactacaacgacccccagtttgtggactttgccccggacagcaccggggaatacagaaccaccagacctatcggaacccgataccttacccgacccctttaa

SEQ ID NO: 110 - protein, 724 aa, synthetic construct
MSFVDHPPDWLEEVGEGLREFLGLEAGPPKPKPNQQHQDQARGLVLPGYNYLGPGNGLDRGEPVNRADEVAREHDISYNEQLEAGDNPYLKYNHADAEFQEKLADDTSFGGNLGKAVFQAKKRVLEPFGLVEEGAKTAPTGKRIDDHFPKRKKARTEEDSKPSTSSDAEAGPSGSQQLQIPAQPASSLGADTMSAGGGGPLGDNNQGADGVGNASGDWHCDSTWMGDRVVTKSTRTWVLPSYNNHQYREIKSGSVDGSNANAYFGYSTPWGYFDFNRFHSHWSPRDWQRLINNYWGFRPRSLRVKIFNIQVKEVTVQDSTTTIANNLTSTVQVFTDDDYQLPYVVGNGTEGCLPAFPPQVFTLPQYGYATLNRDNTENPTERSSFFCLEYFPSKMLRTGNNFEFTYNFEEVPFHSSFAPSQNLFKLANPLVDQYLYRFVSTNNTGGVQFNKNLAGRYANTYKNWFPGPMGRTQGWNLGSGVNRASVSAFATTNRMELEGASYQVPPQPNGMTNNLQGSNTYALENTMIFNSQPANPGTTATYLEGNMLITSESETQPVNRVAYNVGGQMATNNQSSTTAPATGTYNLQEIVPGSVWMERDVYLQGPIWAKIPETGAHFHPSPAMGGFGLKHPPPMMLIKNTPVPGNITSFSDVPVSSFITQYSTGQVTVEMEWELKKEKSKRWNPEIQYTNNYNDPQFVDFAPDSTGEYRTTRPIGTRYLTRPL

SEQ ID NO: 111 - DNA, 1767 bp, synthetic construct
  source 1..1767: mol_type = other DNA
acggcccctaccggaaagcggatagacgaccactttccaaaaagaaagaaggctcggaccgaagaggactccaagccttccacctcgtcagacgccgaagctggacccagcggatcccagcagctgcaaatcccagcccaaccagcctcaagtttgggagctgatacaatgtctgcgggaggtggcggcccattgggcgacaataaccaaggtgccgatggagtgggcaatgcctcgggagattggcattgcgattccacgtggatgggggacagagtcgtcaccaagtccacccgaacctgggtgctgcccagctacaacaaccaccagtaccgagagatcaaaagcggctccgtcgacggaagcaacgccaacgcctactttggatacagcaccccctgggggtactttgactttaaccgcttccacagccactggagcccccgagactggcaaagactcatcaacaactactggggcttcagaccccggtccctcagagtcaaaatcttcaacattcaagtcaaagaggtcacggtgcaggactccaccaccaccatcgccaacaacctcacctccaccgtccaagtgtttacggacgacgactaccagctgccctacgtcgtcggcaacgggaccgagggatgcctgccggccttccctccgcaggtctttacgctgccgcagtacggttacgcgacgctgaaccgcgacaacacagaaaatcccaccgagaggagcagcttcttctgcctagagtactttcccagcaagatgctgagaacgggcaacaactttgagtttacctacaactttgaggaggtgcccttccactccagcttcgctcccagtcagaacctcttcaagctggccaacccgctggtggaccagtacttgtaccgcttcgtgagcacaaataacactggcggagtccagttcaacaagaacctggccgggagatacgccaacacctacaaaaactggttcccggggcccatgggccgaacccagggctggaacctgggctccggggtcaaccgcgccagtgtcagcgccttcgccacgaccaataggatggagctcgagggcgcgagttaccaggtgcccccgcagccgaacggcatgaccaacaacctccagggcagcaacacctatgccctggagaacactatgatcttcaacagccagccggcgaacccgggcaccaccgccacgtacctcgagggcaacatgctcatcaccagcgagagcgagacgcagccggtgaaccgcgtggcgtacaacgtcggcgggcagatggccaccaacaaccagagctccaccactgcccccgcgaccggcacgtacaacctccaggaaatcgtgcccggcagcgtgtggatggagagggacgtgtacctccaaggacccatctgggccaagatcccagagacgggggcgcactttcacccctctccggccatgggcggattcggactcaaacacccaccgcccatgatgctcatcaagaacacgcctgtgcccggaaatatcaccagcttctcggacgtgcccgtcagcagcttcatcacccagtacagcaccgggcaggtcaccgtggagatggagtgggagctcaagaaggaaaagtccaagaggtggaacccagagatccagtacacaaacaactacaacgacccccagtttgtggactttgccccggacagcaccggggaatacagaaccaccagacctatcggaacccgataccttacccgacccctttaa

SEQ ID NO: 112 - protein, 588 aa, synthetic construct
TAPTGKRIDDHFPKRKKARTEEDSKPSTSSDAEAGPSGSQQLQIPAQPASSLGADTMSAGGGGPLGDNNQGADGVGNASGDWHCDSTWMGDRVVTKSTRTWVLPSYNNHQYREIKSGSVDGSNANAYFGYSTPWGYFDFNRFHSHWSPRDWQRLINNYWGFRPRSLRVKIFNIQVKEVTVQDSTTTIANNLTSTVQVFTDDDYQLPYVVGNGTEGCLPAFPPQVFTLPQYGYATLNRDNTENPTERSSFFCLEYFPSKMLRTGNNFEFTYNFEEVPFHSSFAPSQNLFKLANPLVDQYLYRFVSTNNTGGVQFNKNLAGRYANTYKNWFPGPMGRTQGWNLGSGVNRASVSAFATTNRMELEGASYQVPPQPNGMTNNLQGSNTYALENTMIFNSQPANPGTTATYLEGNMLITSESETQPVNRVAYNVGGQMATNNQSSTTAPATGTYNLQEIVPGSVWMERDVYLQGPIWAKIPETGAHFHPSPAMGGFGLKHPPPMMLIKNTPVPGNITSFSDVPVSSFITQYSTGQVTVEMEWELKKEKSKRWNPEIQYTNNYNDPQFVDFAPDSTGEYRTTRPIGTRYLTRPL

SEQ ID NO: 113 - DNA, 1599 bp, synthetic construct
  source 1..1599: mol_type = other DNA
atgtctgcgggaggtggcggcccattgggcgacaataaccaaggtgccgatggagtgggcaatgcctcgggagattggcattgcgattccacgtggatgggggacagagtcgtcaccaagtccacccgaacctgggtgctgcccagctacaacaaccaccagtaccgagagatcaaaagcggctccgtcgacggaagcaacgccaacgcctactttggatacagcaccccctgggggtactttgactttaaccgcttccacagccactggagcccccgagactggcaaagactcatcaacaactactggggcttcagaccccggtccctcagagtcaaaatcttcaacattcaagtcaaagaggtcacggtgcaggactccaccaccaccatcgccaacaacctcacctccaccgtccaagtgtttacggacgacgactaccagctgccctacgtcgtcggcaacgggaccgagggatgcctgccggccttccctccgcaggtctttacgctgccgcagtacggttacgcgacgctgaaccgcgacaacacagaaaatcccaccgagaggagcagcttcttctgcctagagtactttcccagcaagatgctgagaacgggcaacaactttgagtttacctacaactttgaggaggtgcccttccactccagcttcgctcccagtcagaacctcttcaagctggccaacccgctggtggaccagtacttgtaccgcttcgtgagcacaaataacactggcggagtccagttcaacaagaacctggccgggagatacgccaacacctacaaaaactggttcccggggcccatgggccgaacccagggctggaacctgggctccggggtcaaccgcgccagtgtcagcgccttcgccacgaccaataggatggagctcgagggcgcgagttaccaggtgcccccgcagccgaacggcatgaccaacaacctccagggcagcaacacctatgccctggagaacactatgatcttcaacagccagccggcgaacccgggcaccaccgccacgtacctcgagggcaacatgctcatcaccagcgagagcgagacgcagccggtgaaccgcgtggcgtacaacgtcggcgggcagatggccaccaacaaccagagctccaccactgcccccgcgaccggcacgtacaacctccaggaaatcgtgcccggcagcgtgtggatggagagggacgtgtacctccaaggacccatctgggccaagatcccagagacgggggcgcactttcacccctctccggccatgggcggattcggactcaaacacccaccgcccatgatgctcatcaagaacacgcctgtgcccggaaatatcaccagcttctcggacgtgcccgtcagcagcttcatcacccagtacagcaccgggcaggtcaccgtggagatggagtgggagctcaagaaggaaaagtccaagaggtggaacccagagatccagtacacaaacaactacaacgacccccagtttgtggactttgccccggacagcaccggggaatacagaaccaccagacctatcggaacccgataccttacccgacccctttaa

SEQ ID NO: 114 - protein, 532 aa, synthetic construct
MSAGGGGPLGDNNQGADGVGNASGDWHCDSTWMGDRVVTKSTRTWVLPSYNNHQYREIKSGSVDGSNANAYFGYSTPWGYFDFNRFHSHWSPRDWQRLINNYWGFRPRSLRVKIFNIQVKEVTVQDSTTTIANNLTSTVQVFTDDDYQLPYVVGNGTEGCLPAFPPQVFTLPQYGYATLNRDNTENPTERSSFFCLEYFPSKMLRTGNNFEFTYNFEEVPFHSSFAPSQNLFKLANPLVDQYLYRFVSTNNTGGVQFNKNLAGRYANTYKNWFPGPMGRTQGWNLGSGVNRASVSAFATTNRMELEGASYQVPPQPNGMTNNLQGSNTYALENTMIFNSQPANPGTTATYLEGNMLITSESETQPVNRVAYNVGGQMATNNQSSTTAPATGTYNLQEIVPGSVWMERDVYLQGPIWAKIPETGAHFHPSPAMGGFGLKHPPPMMLIKNTPVPGNITSFSDVPVSSFITQYSTGQVTVEMEWELKKEKSKRWNPEIQYTNNYNDPQFVDFAPDSTGEYRTTRPIGTRYLTRPL

SEQ ID NO: 115 - DNA, 2175 bp, synthetic construct
  source 1..2175: mol_type = other DNA
atggcttttgttgatcaccctccagattggttggaagaagttggtgaaggtcttcgcgagtttttgggccttgaagcgggcccaccgaaaccaaaacccaatcagcagcatcaagatcaagcccgtggtcttgtgctgcctggttataactatctcggacccggaaacggtctcgatcgaggagagcctgtcaacagggcagacgaggtcgcgcgagagcacgacatctcgtacaacgagcagcttgaggcgggagacaacccctacctcaagtacaaccacgcggacgccgagtttcaggagaagctcgccgacgacacatccttcgggggaaacctcggaaaggcagtctttcaggccaagaaaagggttctcgaaccttttggcctggttgaagagggtgctaagacggcccctaccggaaagcggatagacgaccactttccaaaaagaaagaaggctcggaccgaagaggactccaagccttccacctcgtcagacgccgaagctggacccagcggatcccagcagctgcaaatcccagcccaaccagcctcaagtttgggagctgatacaatgtctgcgggaggtggcggcccattgggcgacaataaccaaggtgccgatggagtgggcaatgcctcgggagattggcattgcgattccacgtggatgggggacagagtcgtcaccaagtccacccgaacctgggtgctgcccagctacaacaaccaccagtaccgagagatcaaaagcggctccgtcgacggaagcaacgccaacgcctactttggatacagcaccccctgggggtactttgactttaaccgcttccacagccactggagcccccgagactggcaaagactcatcaacaactactggggcttcagaccccggtccctcagagtcaaaatcttcaacattcaagtcaaagaggtcacggtgcaggactccaccaccaccatcgccaacaacctcacctccaccgtccaagtgtttacggacgacgactaccagctgccctacgtcgtcggcaacgggaccgagggatgcctgccggccttccctccgcaggtctttacgctgccgcagtacggttacgcgacgctgaaccgcgacaacacagaaaatcccaccgagaggagcagcttcttctgcctagagtactttcccagcaagatgctgagaacgggcaacaactttgagtttacctacaactttgaggaggtgcccttccactccagcttcgctcccagtcagaacctcttcaagctggccaacccgctggtggaccagtacttgtaccgcttcgtgagcacaaataacactggcggagtccagttcaacaagaacctggccgggagatacgccaacacctacaaaaactggttcccggggcccatgggccgaacccagggctggaacctgggctccggggtcaaccgcgccagtgtcagcgccttcgccacgaccaataggatggagctcgagggcgcgagttaccaggtgcccccgcagccgaacggcatgaccaacaacctccagggcagcaacacctatgccctggagaacactatgatcttcaacagccagccggcgaacccgggcaccaccgccacgtacctcgagggcaacatgctcatcaccagcgagagcgagacgcagccggtgaaccgcgtggcgtacaacgtcggcgggcagatggccaccaacaaccagagctccaccactgcccccgcgaccggcacgtacaacctccaggaaatcgtgcccggcagcgtgtggatggagagggacgtgtacctccaaggacccatctgggccaagatcccagagacgggggcgcactttcacccctctccggccatgggcggattcggactcaaacacccaccgcccatgatgctcatcaagaacacgcctgtgcccggaaatatcaccagcttctcggacgtgcccgtcagcagcttcatcacccagtacagcaccgggcaggtcaccgtggagatggagtgggagctcaagaaggaaaagtccaagaggtggaacccagagatccagtacacaaacaactacaacgacccccagtttgtggactttgccccggacagcaccggggaatacagaagcaccagacctatcggaacccgataccttacccgacccctttaa

SEQ ID NO: 116 - protein, 724 aa, synthetic construct
MAFVDHPPDWLEEVGEGLREFLGLEAGPPKPKPNQQHQDQARGLVLPGYNYLGPGNGLDRGEPVNRADEVAREHDISYNEQLEAGDNPYLKYNHADAEFQEKLADDTSFGGNLGKAVFQAKKRVLEPFGLVEEGAKTAPTGKRIDDHFPKRKKARTEEDSKPSTSSDAEAGPSGSQQLQIPAQPASSLGADTMSAGGGGPLGDNNQGADGVGNASGDWHCDSTWMGDRVVTKSTRTWVLPSYNNHQYREIKSGSVDGSNANAYFGYSTPWGYFDFNRFHSHWSPRDWQRLINNYWGFRPRSLRVKIFNIQVKEVTVQDSTTTIANNLTSTVQVFTDDDYQLPYVVGNGTEGCLPAFPPQVFTLPQYGYATLNRDNTENPTERSSFFCLEYFPSKMLRTGNNFEFTYNFEEVPFHSSFAPSQNLFKLANPLVDQYLYRFVSTNNTGGVQFNKNLAGRYANTYKNWFPGPMGRTQGWNLGSGVNRASVSAFATTNRMELEGASYQVPPQPNGMTNNLQGSNTYALENTMIFNSQPANPGTTATYLEGNMLITSESETQPVNRVAYNVGGQMATNNQSSTTAPATGTYNLQEIVPGSVWMERDVYLQGPIWAKIPETGAHFHPSPAMGGFGLKHPPPMMLIKNTPVPGNITSFSDVPVSSFITQYSTGQVTVEMEWELKKEKSKRWNPEIQYTNNYNDPQFVDFAPDSTGEYRSTRPIGTRYLTRPL

SEQ ID NO: 117 - DNA, 1767 bp, synthetic construct
  source 1..1767: mol_type = other DNA
acggcccctaccggaaagcggatagacgaccactttccaaaaagaaagaaggctcggaccgaagaggactccaagccttccacctcgtcagacgccgaagctggacccagcggatcccagcagctgcaaatcccagcccaaccagcctcaagtttgggagctgatacaatgtctgcgggaggtggcggcccattgggcgacaataaccaaggtgccgatggagtgggcaatgcctcgggagattggcattgcgattccacgtggatgggggacagagtcgtcaccaagtccacccgaacctgggtgctgcccagctacaacaaccaccagtaccgagagatcaaaagcggctccgtcgacggaagcaacgccaacgcctactttggatacagcaccccctgggggtactttgactttaaccgcttccacagccactggagcccccgagactggcaaagactcatcaacaactactggggcttcagaccccggtccctcagagtcaaaatcttcaacattcaagtcaaagaggtcacggtgcaggactccaccaccaccatcgccaacaacctcacctccaccgtccaagtgtttacggacgacgactaccagctgccctacgtcgtcggcaacgggaccgagggatgcctgccggccttccctccgcaggtctttacgctgccgcagtacggttacgcgacgctgaaccgcgacaacacagaaaatcccaccgagaggagcagcttcttctgcctagagtactttcccagcaagatgctgagaacgggcaacaactttgagtttacctacaactttgaggaggtgcccttccactccagcttcgctcccagtcagaacctcttcaagctggccaacccgctggtggaccagtacttgtaccgcttcgtgagcacaaataacactggcggagtccagttcaacaagaacctggccgggagatacgccaacacctacaaaaactggttcccggggcccatgggccgaacccagggctggaacctgggctccggggtcaaccgcgccagtgtcagcgccttcgccacgaccaataggatggagctcgagggcgcgagttaccaggtgcccccgcagccgaacggcatgaccaacaacctccagggcagcaacacctatgccctggagaacactatgatcttcaacagccagccggcgaacccgggcaccaccgccacgtacctcgagggcaacatgctcatcaccagcgagagcgagacgcagccggtgaaccgcgtggcgtacaacgtcggcgggcagatggccaccaacaaccagagctccaccactgcccccgcgaccggcacgtacaacctccaggaaatcgtgcccggcagcgtgtggatggagagggacgtgtacctccaaggacccatctgggccaagatcccagagacgggggcgcactttcacccctctccggccatgggcggattcggactcaaacacccaccgcccatgatgctcatcaagaacacgcctgtgcccggaaatatcaccagcttctcggacgtgcccgtcagcagcttcatcacccagtacagcaccgggcaggtcaccgtggagatggagtgggagctcaagaaggaaaagtccaagaggtggaacccagagatccagtacacaaacaactacaacgacccccagtttgtggactttgccccggacagcaccggggaatacagaagcaccagacctatcggaacccgataccttacccgacccctttaa

SEQ ID NO: 118 - protein, 588 aa, synthetic construct
TAPTGKRIDDHFPKRKKARTEEDSKPSTSSDAEAGPSGSQQLQIPAQPASSLGADTMSAGGGGPLGDNNQGADGVGNASGDWHCDSTWMGDRVVTKSTRTWVLPSYNNHQYREIKSGSVDGSNANAYFGYSTPWGYFDFNRFHSHWSPRDWQRLINNYWGFRPRSLRVKIFNIQVKEVTVQDSTTTIANNLTSTVQVFTDDDYQLPYVVGNGTEGCLPAFPPQVFTLPQYGYATLNRDNTENPTERSSFFCLEYFPSKMLRTGNNFEFTYNFEEVPFHSSFAPSQNLFKLANPLVDQYLYRFVSTNNTGGVQFNKNLAGRYANTYKNWFPGPMGRTQGWNLGSGVNRASVSAFATTNRMELEGASYQVPPQPNGMTNNLQGSNTYALENTMIFNSQPANPGTTATYLEGNMLITSESETQPVNRVAYNVGGQMATNNQSSTTAPATGTYNLQEIVPGSVWMERDVYLQGPIWAKIPETGAHFHPSPAMGGFGLKHPPPMMLIKNTPVPGNITSFSDVPVSSFITQYSTGQVTVEMEWELKKEKSKRWNPEIQYTNNYNDPQFVDFAPDSTGEYRSTRPIGTRYLTRPL

SEQ ID NO: 119 - DNA, 1599 bp, synthetic construct
  source 1..1599: mol_type = other DNA
atgtctgcgggaggtggcggcccattgggcgacaataaccaaggtgccgatggagtgggcaatgcctcgggagattggcattgcgattccacgtggatgggggacagagtcgtcaccaagtccacccgaacctgggtgctgcccagctacaacaaccaccagtaccgagagatcaaaagcggctccgtcgacggaagcaacgccaacgcctactttggatacagcaccccctgggggtactttgactttaaccgcttccacagccactggagcccccgagactggcaaagactcatcaacaactactggggcttcagaccccggtccctcagagtcaaaatcttcaacattcaagtcaaagaggtcacggtgcaggactccaccaccaccatcgccaacaacctcacctccaccgtccaagtgtttacggacgacgactaccagctgccctacgtcgtcggcaacgggaccgagggatgcctgccggccttccctccgcaggtctttacgctgccgcagtacggttacgcgacgctgaaccgcgacaacacagaaaatcccaccgagaggagcagcttcttctgcctagagtactttcccagcaagatgctgagaacgggcaacaactttgagtttacctacaactttgaggaggtgcccttccactccagcttcgctcccagtcagaacctcttcaagctggccaacccgctggtggaccagtacttgtaccgcttcgtgagcacaaataacactggcggagtccagttcaacaagaacctggccgggagatacgccaacacctacaaaaactggttcccggggcccatgggccgaacccagggctggaacctgggctccggggtcaaccgcgccagtgtcagcgccttcgccacgaccaataggatggagctcgagggcgcgagttaccaggtgcccccgcagccgaacggcatgaccaacaacctccagggcagcaacacctatgccctggagaacactatgatcttcaacagccagccggcgaacccgggcaccaccgccacgtacctcgagggcaacatgctcatcaccagcgagagcgagacgcagccggtgaaccgcgtggcgtacaacgtcggcgggcagatggccaccaacaaccagagctccaccactgcccccgcgaccggcacgtacaacctccaggaaatcgtgcccggcagcgtgtggatggagagggacgtgtacctccaaggacccatctgggccaagatcccagagacgggggcgcactttcacccctctccggccatgggcggattcggactcaaacacccaccgcccatgatgctcatcaagaacacgcctgtgcccggaaatatcaccagcttctcggacgtgcccgtcagcagcttcatcacccagtacagcaccgggcaggtcaccgtggagatggagtgggagctcaagaaggaaaagtccaagaggtggaacccagagatccagtacacaaacaactacaacgacccccagtttgtggactttgccccggacagcaccggggaatacagaagcaccagacctatcggaacccgataccttacccgacccctttaa

SEQ ID NO: 120 - protein, 532 aa, synthetic construct
MSAGGGGPLGDNNQGADGVGNASGDWHCDSTWMGDRVVTKSTRTWVLPSYNNHQYREIKSGSVDGSNANAYFGYSTPWGYFDFNRFHSHWSPRDWQRLINNYWGFRPRSLRVKIFNIQVKEVTVQDSTTTIANNLTSTVQVFTDDDYQLPYVVGNGTEGCLPAFPPQVFTLPQYGYATLNRDNTENPTERSSFFCLEYFPSKMLRTGNNFEFTYNFEEVPFHSSFAPSQNLFKLANPLVDQYLYRFVSTNNTGGVQFNKNLAGRYANTYKNWFPGPMGRTQGWNLGSGVNRASVSAFATTNRMELEGASYQVPPQPNGMTNNLQGSNTYALENTMIFNSQPANPGTTATYLEGNMLITSESETQPVNRVAYNVGGQMATNNQSSTTAPATGTYNLQEIVPGSVWMERDVYLQGPIWAKIPETGAHFHPSPAMGGFGLKHPPPMMLIKNTPVPGNITSFSDVPVSSFITQYSTGQVTVEMEWELKKEKSKRWNPEIQYTNNYNDPQFVDFAPDSTGEYRSTRPIGTRYLTRPL

SEQ ID NO: 121 - DNA, 2175 bp, synthetic construct
  source 1..2175: mol_type = other DNA
atgtcttttgttgatcaccctccagattggttggaagaagttggtgaaggtcttcgcgagtttttgggccttgaagcgggcccaccgaaaccaaaacccaatcagcagcatcaagatcaagcccgtggtcttgtgctgcctggttataactatctcggacccggaaacggtctcgatcgaggagagcctgtcaacagggcagacgaggtcgcgcgagagcacgacatctcgtacaacgagcagcttgaggcgggagacaacccctacctcaagtacaaccacgcggacgccgagtttcaggagaagctcgccgacgacacatccttcgggggaaacctcggaaaggcagtctttcaggccaagaaaagggttctcgaaccttttggcctggttgaagagggtgctaagacggcccctaccggaaagcggatagacgaccactttccaaaaagaaagaaggctcggaccgaagaggactccaagccttccacctcgtcagacgccgaagctggacccagcggatcccagcagctgcaaatcccagcccaaccagcctcaagtttgggagctgatacaatgtctgcgggaggtggcggcccattgggcgacaataaccaaggtgccgatggagtgggcaatgcctcgggagattggcattgcgattccacgtggatgggggacagagtcgtcaccaagtccacccgaacctgggtgctgcccagctacaacaaccaccagtaccgagagatcaaaagcggctccgtcgacggaagcaacgccaacgcctactttggatacagcaccccctgggggtactttgactttaaccgcttccacagccactggagcccccgagactggcaaagactcatcaacaactactggggcttcagaccccggtccctcagagtcaaaatcttcaacattcaagtcaaagaggtcacggtgcaggactccaccaccaccatcgccaacaacctcacctccaccgtccaagtgtttacggacgacgactaccagctgccctacgtcgtcggcaacgggaccgagggatgcctgccggccttccctccgcaggtctttacgctgccgcagtacggttacgcgacgctgaaccgcgacaacacagaaaatcccaccgagaggagcagcttcttctgcctagagtactttcccagcaagatgctgagaacgggcaacaactttgagtttacctacaactttgaggaggtgcccttccactccagcttcgctcccagtcagaacctcttcaagctggccaacccgctggtggaccagtacttgtaccgcttcgtgagcacaaataacactggcggagtccagttcaacaagaacctggccgggagatacgccaacacctacaaaaactggttcccggggcccatgggccgaacccagggctggaacctgggctccggggtcaaccgcgccagtgtcagcgccttcgccacgaccaataggatggagctcgagggcgcgagttaccaggtgcccccgcagccgaacggcatgaccaacaacctccagggcagcaacacctatgccctggagaacactatgatcttcaacagccagccggcgaacccgggcaccaccgccacgtacctcgagggcaacatgctcatcaccagcgagagcgagacgcagccggtgaaccgcgtggcgtacaacgtcggcgggcagatggccaccaacaaccagagctccaccactgcccccgcgaccggcacgtacaacctccaggaaatcgtgcccggcagcgtgtggatggagagggacgtgtacctccaaggacccatctgggccaagatcccagagacgggggcgcactttcacccctctccggccatgggcggattcggactcaaacacccaccgcccatgatgctcatcaagaacacgcctgtgcccggaaatatcaccagcttctcggacgtgcccgtcagcagcttcatcacccagtacagcaccgggcaggtcaccgtggagatggagtgggagctcaagaaggaaaactccaagaggtggaacccagagatccagtacacaaacaactacaacgacccccagtttgtggactttgccccggacagcaccggggaatacagaaccaccagacctatcggaacccgataccttacccgagtgctttaa

SEQ ID NO: 122 - protein, 724 aa, synthetic construct
MSFVDHPPDWLEEVGEGLREFLGLEAGPPKPKPNQQHQDQARGLVLPGYNYLGPGNGLDRGEPVNRADEVAREHDISYNEQLEAGDNPYLKYNHADAEFQEKLADDTSFGGNLGKAVFQAKKRVLEPFGLVEEGAKTAPTGKRIDDHFPKRKKARTEEDSKPSTSSDAEAGPSGSQQLQIPAQPASSLGADTMSAGGGGPLGDNNQGADGVGNASGDWHCDSTWMGDRVVTKSTRTWVLPSYNNHQYREIKSGSVDGSNANAYFGYSTPWGYFDFNRFHSHWSPRDWQRLINNYWGFRPRSLRVKIFNIQVKEVTVQDSTTTIANNLTSTVQVFTDDDYQLPYVVGNGTEGCLPAFPPQVFTLPQYGYATLNRDNTENPTERSSFFCLEYFPSKMLRTGNNFEFTYNFEEVPFHSSFAPSQNLFKLANPLVDQYLYRFVSTNNTGGVQFNKNLAGRYANTYKNWFPGPMGRTQGWNLGSGVNRASVSAFATTNRMELEGASYQVPPQPNGMTNNLQGSNTYALENTMIFNSQPANPGTTATYLEGNMLITSESETQPVNRVAYNVGGQMATNNQSSTTAPATGTYNLQEIVPGSVWMERDVYLQGPIWAKIPETGAHFHPSPAMGGFGLKHPPPMMLIKNTPVPGNITSFSDVPVSSFITQYSTGQVTVEMEWELKKENSKRWNPEIQYTNNYNDPQFVDFAPDSTGEYRTTRPIGTRYLTRVL

SEQ ID NO: 123 - DNA, 1767 bp, synthetic construct
  source 1..1767: mol_type = other DNA
acggcccctaccggaaagcggatagacgaccactttccaaaaagaaagaaggctcggaccgaagaggactccaagccttccacctcgtcagacgccgaagctggacccagcggatcccagcagctgcaaatcccagcccaaccagcctcaagtttgggagctgatacaatgtctgcgggaggtggcggcccattgggcgacaataaccaaggtgccgatggagtgggcaatgcctcgggagattggcattgcgattccacgtggatgggggacagagtcgtcaccaagtccacccgaacctgggtgctgcccagctacaacaaccaccagtaccgagagatcaaaagcggctccgtcgacggaagcaacgccaacgcctactttggatacagcaccccctgggggtactttgactttaaccgcttccacagccactggagcccccgagactggcaaagactcatcaacaactactggggcttcagaccccggtccctcagagtcaaaatcttcaacattcaagtcaaagaggtcacggtgcaggactccaccaccaccatcgccaacaacctcacctccaccgtccaagtgtttacggacgacgactaccagctgccctacgtcgtcggcaacgggaccgagggatgcctgccggccttccctccgcaggtctttacgctgccgcagtacggttacgcgacgctgaaccgcgacaacacagaaaatcccaccgagaggagcagcttcttctgcctagagtactttcccagcaagatgctgagaacgggcaacaactttgagtttacctacaactttgaggaggtgcccttccactccagcttcgctcccagtcagaacctcttcaagctggccaacccgctggtggaccagtacttgtaccgcttcgtgagcacaaataacactggcggagtccagttcaacaagaacctggccgggagatacgccaacacctacaaaaactggttcccggggcccatgggccgaacccagggctggaacctgggctccggggtcaaccgcgccagtgtcagcgccttcgccacgaccaataggatggagctcgagggcgcgagttaccaggtgcccccgcagccgaacggcatgaccaacaacctccagggcagcaacacctatgccctggagaacactatgatcttcaacagccagccggcgaacccgggcaccaccgccacgtacctcgagggcaacatgctcatcaccagcgagagcgagacgcagccggtgaaccgcgtggcgtacaacgtcggcgggcagatggccaccaacaaccagagctccaccactgcccccgcgaccggcacgtacaacctccaggaaatcgtgcccggcagcgtgtggatggagagggacgtgtacctccaaggacccatctgggccaagatcccagagacgggggcgcactttcacccctctccggccatgggcggattcggactcaaacacccaccgcccatgatgctcatcaagaacacgcctgtgcccggaaatatcaccagcttctcggacgtgcccgtcagcagcttcatcacccagtacagcaccgggcaggtcaccgtggagatggagtgggagctcaagaaggaaaactccaagaggtggaacccagagatccagtacacaaacaactacaacgacccccagtttgtggactttgccccggacagcaccggggaatacagaaccaccagacctatcggaacccgataccttacccgagtgctttaa

SEQ ID NO: 124 - protein, 588 aa, synthetic construct
TAPTGKRIDDHFPKRKKARTEEDSKPSTSSDAEAGPSGSQQLQIPAQPASSLGADTMSAGGGGPLGDNNQGADGVGNASGDWHCDSTWMGDRVVTKSTRTWVLPSYNNHQYREIKSGSVDGSNANAYFGYSTPWGYFDFNRFHSHWSPRDWQRLINNYWGFRPRSLRVKIFNIQVKEVTVQDSTTTIANNLTSTVQVFTDDDYQLPYVVGNGTEGCLPAFPPQVFTLPQYGYATLNRDNTENPTERSSFFCLEYFPSKMLRTGNNFEFTYNFEEVPFHSSFAPSQNLFKLANPLVDQYLYRFVSTNNTGGVQFNKNLAGRYANTYKNWFPGPMGRTQGWNLGSGVNRASVSAFATTNRMELEGASYQVPPQPNGMTNNLQGSNTYALENTMIFNSQPANPGTTATYLEGNMLITSESETQPVNRVAYNVGGQMATNNQSSTTAPATGTYNLQEIVPGSVWMERDVYLQGPIWAKIPETGAHFHPSPAMGGFGLKHPPPMMLIKNTPVPGNITSFSDVPVSSFITQYSTGQVTVEMEWELKKENSKRWNPEIQYTNNYNDPQFVDFAPDSTGEYRTTRPIGTRYLTRVL

SEQ ID NO: 125 - DNA, 1599 bp, synthetic construct
  source 1..1599: mol_type = other DNA
atgtctgcgggaggtggcggcccattgggcgacaataaccaaggtgccgatggagtgggcaatgcctcgggagattggcattgcgattccacgtggatgggggacagagtcgtcaccaagtccacccgaacctgggtgctgcccagctacaacaaccaccagtaccgagagatcaaaagcggctccgtcgacggaagcaacgccaacgcctactttggatacagcaccccctgggggtactttgactttaaccgcttccacagccactggagcccccgagactggcaaagactcatcaacaactactggggcttcagaccccggtccctcagagtcaaaatcttcaacattcaagtcaaagaggtcacggtgcaggactccaccaccaccatcgccaacaacctcacctccaccgtccaagtgtttacggacgacgactaccagctgccctacgtcgtcggcaacgggaccgagggatgcctgccggccttccctccgcaggtctttacgctgccgcagtacggttacgcgacgctgaaccgcgacaacacagaaaatcccaccgagaggagcagcttcttctgcctagagtactttcccagcaagatgctgagaacgggcaacaactttgagtttacctacaactttgaggaggtgcccttccactccagcttcgctcccagtcagaacctcttcaagctggccaacccgctggtggaccagtacttgtaccgcttcgtgagcacaaataacactggcggagtccagttcaacaagaacctggccgggagatacgccaacacctacaaaaactggttcccggggcccatgggccgaacccagggctggaacctgggctccggggtcaaccgcgccagtgtcagcgccttcgccacgaccaataggatggagctcgagggcgcgagttaccaggtgcccccgcagccgaacggcatgaccaacaacctccagggcagcaacacctatgccctggagaacactatgatcttcaacagccagccggcgaacccgggcaccaccgccacgtacctcgagggcaacatgctcatcaccagcgagagcgagacgcagccggtgaaccgcgtggcgtacaacgtcggcgggcagatggccaccaacaaccagagctccaccactgcccccgcgaccggcacgtacaacctccaggaaatcgtgcccggcagcgtgtggatggagagggacgtgtacctccaaggacccatctgggccaagatcccagagacgggggcgcactttcacccctctccggccatgggcggattcggactcaaacacccaccgcccatgatgctcatcaagaacacgcctgtgcccggaaatatcaccagcttctcggacgtgcccgtcagcagcttcatcacccagtacagcaccgggcaggtcaccgtggagatggagtgggagctcaagaaggaaaactccaagaggtggaacccagagatccagtacacaaacaactacaacgacccccagtttgtggactttgccccggacagcaccggggaatacagaaccaccagacctatcggaacccgataccttacccgagtgctttaa

SEQ ID NO: 126 - protein, 532 aa, synthetic construct
MSAGGGGPLGDNNQGADGVGNASGDWHCDSTWMGDRVVTKSTRTWVLPSYNNHQYREIKSGSVDGSNANAYFGYSTPWGYFDFNRFHSHWSPRDWQRLINNYWGFRPRSLRVKIFNIQVKEVTVQDSTTTIANNLTSTVQVFTDDDYQLPYVVGNGTEGCLPAFPPQVFTLPQYGYATLNRDNTENPTERSSFFCLEYFPSKMLRTGNNFEFTYNFEEVPFHSSFAPSQNLFKLANPLVDQYLYRFVSTNNTGGVQFNKNLAGRYANTYKNWFPGPMGRTQGWNLGSGVNRASVSAFATTNRMELEGASYQVPPQPNGMTNNLQGSNTYALENTMIFNSQPANPGTTATYLEGNMLITSESETQPVNRVAYNVGGQMATNNQSSTTAPATGTYNLQEIVPGSVWMERDVYLQGPIWAKIPETGAHFHPSPAMGGFGLKHPPPMMLIKNTPVPGNITSFSDVPVSSFITQYSTGQVTVEMEWELKKENSKRWNPEIQYTNNYNDPQFVDFAPDSTGEYRTTRPIGTRYLTRVL

SEQ ID NO: 127 - DNA, 2175 bp, synthetic construct
  source 1..2175: mol_type = other DNA
atggcttttgttgatcaccctccagattggttggaagaagttggtgaaggtcttcgcgagtttttgggccttgaagcgggcccaccgaaaccaaaacccaatcagcagcatcaagatcaagcccgtggtcttgtgctgcctggttataactatctcggacccggaaacggtctcgatcgaggagagcctgtcaacagggcagacgaggtcgcgcgagagcacgacatctcgtacaacgagcagcttgaggcgggagacaacccctacctcaagtacaaccacgcggacgccgagtttcaggagaagctcgccgacgacacatccttcgggggaaacctcggaaaggcagtctttcaggccaagaaaagggttctcgaaccttttggcctggttgaagagggtgctaagacggcccctaccggaaagcggatagacgaccactttccaaaaagaaagaaggctcggaccgaagaggactccaagccttccacctcgtcagacgccgaagctggacccagcggatcccagcagctgcaaatcccagcccaaccagcctcaagtttgggagctgatacaatgtctgcgggaggtggcggcccattgggcgacaataaccaaggtgccgatggagtgggcaatgcctcgggagattggcattgcgattccacgtggatgggggacagagtcgtcaccaagtccacccgaacctgggtgctgcccagctacaacaaccaccagtaccgagagatcaaaagcggctccgtcgacggaagcaacgccaacgcctactttggatacagcaccccctgggggtactttgactttaaccgcttccacagccactggagcccccgagactggcaaagactcatcaacaactactggggcttcagaccccggtccctcagagtcaaaatcttcaacattcaagtcaaagaggtcacggtgcaggactccaccaccaccatcgccaacaacctcacctccaccgtccaagtgtttacggacgacgactaccagctgccctacgtcgtcggcaacgggaccgagggatgcctgccggccttccctccgcaggtctttacgctgccgcagtacggttacgcgacgctgaaccgcgacaacacagaaaatcccaccgagaggagcagcttcttctgcctagagtactttcccagcaagatgctgagaacgggcaacaactttgagtttacctacaactttgaggaggtgcccttccactccagcttcgctcccagtcagaacctcttcaagctggccaacccgctggtggaccagtacttgtaccgcttcgtgagcacaaataacactggcggagtccagttcaacaagaacctggccgggagatacgccaacacctacaaaaactggttcccggggcccatgggccgaacccagggctggaacctgggctccggggtcaaccgcgccagtgtcagcgccttcgccacgaccaataggatggagctcgagggcgcgagttaccaggtgcccccgcagccgaacggcatgaccaacaacctccagggcagcaacacctatgccctggagaacactatgatcttcaacagccagccggcgaacccgggcaccaccgccacgtacctcgagggcaacatgctcatcaccagcgagagcgagacgcagccggtgaaccgcgtggcgtacaacgtcggcgggcagatggccaccaacaaccagagctccaccactgcccccgcgaccggcacgtacaacctccaggaaatcgtgcccggcagcgtgtggatggagagggacgtgtacctccaaggacccatctgggccaagatcccagagacgggggcgcactttcacccctctccggccatgggcggattcggactcaaacacccaccgcccatgatgctcatcaagaacacgcctgtgcccggaaatatcaccagcttctcggacgtgcccgtcagcagcttcatcacccagtacagcaccgggcaggtcaccgtggagatggagtgggagctcaagaaggaaaactccaagaggtggaacccagagatccagtacacaaacaactacaacgacccccagtttgtggactttgccccggacagcaccggggaatacagaagcaccagacctatcggaacccgataccttacccgagtgctttaa

SEQ ID NO: 128 - protein, 724 aa, synthetic construct
MAFVDHPPDWLEEVGEGLREFLGLEAGPPKPKPNQQHQDQARGLVLPGYNYLGPGNGLDRGEPVNRADEVAREHDISYNEQLEAGDNPYLKYNHADAEFQEKLADDTSFGGNLGKAVFQAKKRVLEPFGLVEEGAKTAPTGKRIDDHFPKRKKARTEEDSKPSTSSDAEAGPSGSQQLQIPAQPASSLGADTMSAGGGGPLGDNNQGADGVGNASGDWHCDSTWMGDRVVTKSTRTWVLPSYNNHQYREIKSGSVDGSNANAYFGYSTPWGYFDFNRFHSHWSPRDWQRLINNYWGFRPRSLRVKIFNIQVKEVTVQDSTTTIANNLTSTVQVFTDDDYQLPYVVGNGTEGCLPAFPPQVFTLPQYGYATLNRDNTENPTERSSFFCLEYFPSKMLRTGNNFEFTYNFEEVPFHSSFAPSQNLFKLANPLVDQYLYRFVSTNNTGGVQFNKNLAGRYANTYKNWFPGPMGRTQGWNLGSGVNRASVSAFATTNRMELEGASYQVPPQPNGMTNNLQGSNTYALENTMIFNSQPANPGTTATYLEGNMLITSESETQPVNRVAYNVGGQMATNNQSSTTAPATGTYNLQEIVPGSVWMERDVYLQGPIWAKIPETGAHFHPSPAMGGFGLKHPPPMMLIKNTPVPGNITSFSDVPVSSFITQYSTGQVTVEMEWELKKENSKRWNPEIQYTNNYNDPQFVDFAPDSTGEYRSTRPIGTRYLTRVL

SEQ ID NO: 129 - DNA, 1767 bp, synthetic construct
  source 1..1767: mol_type = other DNA
acggcccctaccggaaagcggatagacgaccactttccaaaaagaaagaaggctcggaccgaagaggactccaagccttccacctcgtcagacgccgaagctggacccagcggatcccagcagctgcaaatcccagcccaaccagcctcaagtttgggagctgatacaatgtctgcgggaggtggcggcccattgggcgacaataaccaaggtgccgatggagtgggcaatgcctcgggagattggcattgcgattccacgtggatgggggacagagtcgtcaccaagtccacccgaacctgggtgctgcccagctacaacaaccaccagtaccgagagatcaaaagcggctccgtcgacggaagcaacgccaacgcctactttggatacagcaccccctgggggtactttgactttaaccgcttccacagccactggagcccccgagactggcaaagactcatcaacaactactggggcttcagaccccggtccctcagagtcaaaatcttcaacattcaagtcaaagaggtcacggtgcaggactccaccaccaccatcgccaacaacctcacctccaccgtccaagtgtttacggacgacgactaccagctgccctacgtcgtcggcaacgggaccgagggatgcctgccggccttccctccgcaggtctttacgctgccgcagtacggttacgcgacgctgaaccgcgacaacacagaaaatcccaccgagaggagcagcttcttctgcctagagtactttcccagcaagatgctgagaacgggcaacaactttgagtttacctacaactttgaggaggtgcccttccactccagcttcgctcccagtcagaacctcttcaagctggccaacccgctggtggaccagtacttgtaccgcttcgtgagcacaaataacactggcggagtccagttcaacaagaacctggccgggagatacgccaacacctacaaaaactggttcccggggcccatgggccgaacccagggctggaacctgggctccggggtcaaccgcgccagtgtcagcgccttcgccacgaccaataggatggagctcgagggcgcgagttaccaggtgcccccgcagccgaacggcatgaccaacaacctccagggcagcaacacctatgccctggagaacactatgatcttcaacagccagccggcgaacccgggcaccaccgccacgtacctcgagggcaacatgctcatcaccagcgagagcgagacgcagccggtgaaccgcgtggcgtacaacgtcggcgggcagatggccaccaacaaccagagctccaccactgcccccgcgaccggcacgtacaacctccaggaaatcgtgcccggcagcgtgtggatggagagggacgtgtacctccaaggacccatctgggccaagatcccagagacgggggcgcactttcacccctctccggccatgggcggattcggactcaaacacccaccgcccatgatgctcatcaagaacacgcctgtgcccggaaatatcaccagcttctcggacgtgcccgtcagcagcttcatcacccagtacagcaccgggcaggtcaccgtggagatggagtgggagctcaagaaggaaaactccaagaggtggaacccagagatccagtacacaaacaactacaacgacccccagtttgtggactttgccccggacagcaccggggaatacagaagcaccagacctatcggaacccgataccttacccgagtgctttaa

SEQ ID NO: 130 - protein, 588 aa, synthetic construct
TAPTGKRIDDHFPKRKKARTEEDSKPSTSSDAEAGPSGSQQLQIPAQPASSLGADTMSAGGGGPLGDNNQGADGVGNASGDWHCDSTWMGDRVVTKSTRTWVLPSYNNHQYREIKSGSVDGSNANAYFGYSTPWGYFDFNRFHSHWSPRDWQRLINNYWGFRPRSLRVKIFNIQVKEVTVQDSTTTIANNLTSTVQVFTDDDYQLPYVVGNGTEGCLPAFPPQVFTLPQYGYATLNRDNTENPTERSSFFCLEYFPSKMLRTGNNFEFTYNFEEVPFHSSFAPSQNLFKLANPLVDQYLYRFVSTNNTGGVQFNKNLAGRYANTYKNWFPGPMGRTQGWNLGSGVNRASVSAFATTNRMELEGASYQVPPQPNGMTNNLQGSNTYALENTMIFNSQPANPGTTATYLEGNMLITSESETQPVNRVAYNVGGQMATNNQSSTTAPATGTYNLQEIVPGSVWMERDVYLQGPIWAKIPETGAHFHPSPAMGGFGLKHPPPMMLIKNTPVPGNITSFSDVPVSSFITQYSTGQVTVEMEWELKKENSKRWNPEIQYTNNYNDPQFVDFAPDSTGEYRSTRPIGTRYLTRVL

SEQ ID NO: 131 - DNA, 1599 bp, synthetic construct
  source 1..1599: mol_type = other DNA
atgtctgcgggaggtggcggcccattgggcgacaataaccaaggtgccgatggagtgggcaatgcctcgggagattggcattgcgattccacgtggatgggggacagagtcgtcaccaagtccacccgaacctgggtgctgcccagctacaacaaccaccagtaccgagagatcaaaagcggctccgtcgacggaagcaacgccaacgcctactttggatacagcaccccctgggggtactttgactttaaccgcttccacagccactggagcccccgagactggcaaagactcatcaacaactactggggcttcagaccccggtccctcagagtcaaaatcttcaacattcaagtcaaagaggtcacggtgcaggactccaccaccaccatcgccaacaacctcacctccaccgtccaagtgtttacggacgacgactaccagctgccctacgtcgtcggcaacgggaccgagggatgcctgccggccttccctccgcaggtctttacgctgccgcagtacggttacgcgacgctgaaccgcgacaacacagaaaatcccaccgagaggagcagcttcttctgcctagagtactttcccagcaagatgctgagaacgggcaacaactttgagtttacctacaactttgaggaggtgcccttccactccagcttcgctcccagtcagaacctcttcaagctggccaacccgctggtggaccagtacttgtaccgcttcgtgagcacaaataacactggcggagtccagttcaacaagaacctggccgggagatacgccaacacctacaaaaactggttcccggggcccatgggccgaacccagggctggaacctgggctccggggtcaaccgcgccagtgtcagcgccttcgccacgaccaataggatggagctcgagggcgcgagttaccaggtgcccccgcagccgaacggcatgaccaacaacctccagggcagcaacacctatgccctggagaacactatgatcttcaacagccagccggcgaacccgggcaccaccgccacgtacctcgagggcaacatgctcatcaccagcgagagcgagacgcagccggtgaaccgcgtggcgtacaacgtcggcgggcagatggccaccaacaaccagagctccaccactgcccccgcgaccggcacgtacaacctccaggaaatcgtgcccggcagcgtgtggatggagagggacgtgtacctccaaggacccatctgggccaagatcccagagacgggggcgcactttcacccctctccggccatgggcggattcggactcaaacacccaccgcccatgatgctcatcaagaacacgcctgtgcccggaaatatcaccagcttctcggacgtgcccgtcagcagcttcatcacccagtacagcaccgggcaggtcaccgtggagatggagtgggagctcaagaaggaaaactccaagaggtggaacccagagatccagtacacaaacaactacaacgacccccagtttgtggactttgccccggacagcaccggggaatacagaagcaccagacctatcggaacccgataccttacccgagtgctttaa

SEQ ID NO: 132 - protein, 532 aa, synthetic construct
MSAGGGGPLGDNNQGADGVGNASGDWHCDSTWMGDRVVTKSTRTWVLPSYNNHQYREIKSGSVDGSNANAYFGYSTPWGYFDFNRFHSHWSPRDWQRLINNYWGFRPRSLRVKIFNIQVKEVTVQDSTTTIANNLTSTVQVFTDDDYQLPYVVGNGTEGCLPAFPPQVFTLPQYGYATLNRDNTENPTERSSFFCLEYFPSKMLRTGNNFEFTYNFEEVPFHSSFAPSQNLFKLANPLVDQYLYRFVSTNNTGGVQFNKNLAGRYANTYKNWFPGPMGRTQGWNLGSGVNRASVSAFATTNRMELEGASYQVPPQPNGMTNNLQGSNTYALENTMIFNSQPANPGTTATYLEGNMLITSESETQPVNRVAYNVGGQMATNNQSSTTAPATGTYNLQEIVPGSVWMERDVYLQGPIWAKIPETGAHFHPSPAMGGFGLKHPPPMMLIKNTPVPGNITSFSDVPVSSFITQYSTGQVTVEMEWELKKENSKRWNPEIQYTNNYNDPQFVDFAPDSTGEYRSTRPIGTRYLTRVL

SEQ ID NO: 133 - DNA, 2175 bp, synthetic construct
  source 1..2175: mol_type = other DNA
atgtcttttgttgatcaccctccagattggttggaagaagttggtgaaggtcttcgcgagtttttgggccttgaagcgggcccaccgaaaccaaaacccaatcagcagcatcaagatcaagcccgtggtcttgtgctgcctggttataactatctcggacccggaaacggtctcgatcgaggagagcctgtcaacagggcagacgaggtcgcgcgagagcacgacatctcgtacaacgagcagcttgaggcgggagacaacccctacctcaagtacaaccacgcggacgccgagtttcaggagaagctcgccgacgacacatccttcgggggaaacctcggaaaggcagtctttcaggccaagaaaagggttctcgaaccttttggcctggttgaagagggtgctaagacggcccctaccggaaagcggatagacgaccactttccaaaaagaaagaaggctcggaccgaagaggactccaagccttccacctcgtcagacgccgaagctggacccagcggatcccagcagctgcaaatcccagcccaaccagcctcaagtttgggagctgatacaatgtctgcgggaggtggcggcccattgggcgacaataaccaaggtgccgatggagtgggcaatgcctcgggagattggcattgcgattccacgtggatgggggacagagtcgtcaccaagtccacccgaacctgggtgctgcccagctacaacaaccaccagtaccgagagatcaaaagcggctccgtcgacggaagcaacgccaacgcctactttggatacagcaccccctgggggtactttgactttaaccgcttccacagccactggagcccccgagactggcaaagactcatcaacaactactggggcttcagaccccggtccctcagagtcaaaatcttcaacattcaagtcaaagaggtcacggtgcaggactccaccaccaccatcgccaacaacctcacctccaccgtccaagtgtttacggacgacgactaccagctgccctacgtcgtcggcaacgggaccgagggatgcctgccggccttccctccgcaggtctttacgctgccgcagtacggttacgcgacgctgaaccgcgacaacacagaaaatcccaccgagaggagcagcttcttctgcctagagtactttcccagcaagatgctgagaacgggcaacaactttgagtttacctacaactttgaggaggtgcccttccactccagcttcgctcccagtcagaacctcttcaagctggccaacccgctgtacgaccagtacttgtaccgcttcgtgagcacaaataacactggcggagtccagttcaacaagaacctggccgggagatacgccaacacctacaaaaactggttcccggggcccatgggccgaacccagggctggaacctgggctccggggtcaaccgcgccagtgtcagcgccttcgccacgaccaataggatggagctcgagggcgcgagttaccaggtgcccccgcagccgaacggcatgaccaacaacctccagggcagcaacacctatgccctggagaacactatgatcttcaacagccagccggcgaacccgggcaccaccgccacgtacctcgagggcaacatgctcatcaccagcgagagcgagacgcagccggtgaaccgcgtggcgtacaacgtcggcgggcagatggccaccaacaaccagagctccaccactgcccccgcgaccggcacgtacaacctccaggaaatcgtgcccggcagcgtgtggatggagagggacgtgtacctccaaggacccatctgggccaagatcccagagacgggggcgcactttcacccctctccggccatgggcggattcggactcaaacacccaccgcccatgatgctcatcaagaacacgcctgtgcccggaaatatcaccagcttctcggacgtgcccgtcagcagcttcatcacccagtacagcaccgggcaggtcaccgtggagatggagtgggagctcaagaaggaaaactccaagaggtggaacccagagatccagtacacaaacaactacaacgacccccagtttgtggactttgccccggacagcaccggggaatacagaaccaccagacctatcggaacccgataccttacccgacccctttaa

SEQ ID NO: 134 - protein, 724 aa, synthetic construct
MSFVDHPPDWLEEVGEGLREFLGLEAGPPKPKPNQQHQDQARGLVLPGYNYLGPGNGLDRGEPVNRADEVAREHDISYNEQLEAGDNPYLKYNHADAEFQEKLADDTSFGGNLGKAVFQAKKRVLEPFGLVEEGAKTAPTGKRIDDHFPKRKKARTEEDSKPSTSSDAEAGPSGSQQLQIPAQPASSLGADTMSAGGGGPLGDNNQGADGVGNASGDWHCDSTWMGDRVVTKSTRTWVLPSYNNHQYREIKSGSVDGSNANAYFGYSTPWGYFDFNRFHSHWSPRDWQRLINNYWGFRPRSLRVKIFNIQVKEVTVQDSTTTIANNLTSTVQVFTDDDYQLPYVVGNGTEGCLPAFPPQVFTLPQYGYATLNRDNTENPTERSSFFCLEYFPSKMLRTGNNFEFTYNFEEVPFHSSFAPSQNLFKLANPLYDQYLYRFVSTNNTGGVQFNKNLAGRYANTYKNWFPGPMGRTQGWNLGSGVNRASVSAFATTNRMELEGASYQVPPQPNGMTNNLQGSNTYALENTMIFNSQPANPGTTATYLEGNMLITSESETQPVNRVAYNVGGQMATNNQSSTTAPATGTYNLQEIVPGSVWMERDVYLQGPIWAKIPETGAHFHPSPAMGGFGLKHPPPMMLIKNTPVPGNITSFSDVPVSSFITQYSTGQVTVEMEWELKKENSKRWNPEIQYTNNYNDPQFVDFAPDSTGEYRTTRPIGTRYLTRPL

SEQ ID NO: 135 - DNA, 1767 bp, synthetic construct
  source 1..1767: mol_type = other DNA
acggcccctaccggaaagcggatagacgaccactttccaaaaagaaagaaggctcggaccgaagaggactccaagccttccacctcgtcagacgccgaagctggacccagcggatcccagcagctgcaaatcccagcccaaccagcctcaagtttgggagctgatacaatgtctgcgggaggtggcggcccattgggcgacaataaccaaggtgccgatggagtgggcaatgcctcgggagattggcattgcgattccacgtggatgggggacagagtcgtcaccaagtccacccgaacctgggtgctgcccagctacaacaaccaccagtaccgagagatcaaaagcggctccgtcgacggaagcaacgccaacgcctactttggatacagcaccccctgggggtactttgactttaaccgcttccacagccactggagcccccgagactggcaaagactcatcaacaactactggggcttcagaccccggtccctcagagtcaaaatcttcaacattcaagtcaaagaggtcacggtgcaggactccaccaccaccatcgccaacaacctcacctccaccgtccaagtgtttacggacgacgactaccagctgccctacgtcgtcggcaacgggaccgagggatgcctgccggccttccctccgcaggtctttacgctgccgcagtacggttacgcgacgctgaaccgcgacaacacagaaaatcccaccgagaggagcagcttcttctgcctagagtactttcccagcaagatgctgagaacgggcaacaactttgagtttacctacaactttgaggaggtgcccttccactccagcttcgctcccagtcagaacctcttcaagctggccaacccgctgtacgaccagtacttgtaccgcttcgtgagcacaaataacactggcggagtccagttcaacaagaacctggccgggagatacgccaacacctacaaaaactggttcccggggcccatgggccgaacccagggctggaacctgggctccggggtcaaccgcgccagtgtcagcgccttcgccacgaccaataggatggagctcgagggcgcgagttaccaggtgcccccgcagccgaacggcatgaccaacaacctccagggcagcaacacctatgccctggagaacactatgatcttcaacagccagccggcgaacccgggcaccaccgccacgtacctcgagggcaacatgctcatcaccagcgagagcgagacgcagccggtgaaccgcgtggcgtacaacgtcggcgggcagatggccaccaacaaccagagctccaccactgcccccgcgaccggcacgtacaacctccaggaaatcgtgcccggcagcgtgtggatggagagggacgtgtacctccaaggacccatctgggccaagatcccagagacgggggcgcactttcacccctctccggccatgggcggattcggactcaaacacccaccgcccatgatgctcatcaagaacacgcctgtgcccggaaatatcaccagcttctcggacgtgcccgtcagcagcttcatcacccagtacagcaccgggcaggtcaccgtggagatggagtgggagctcaagaaggaaaactccaagaggtggaacccagagatccagtacacaaacaactacaacgacccccagtttgtggactttgccccggacagcaccggggaatacagaaccaccagacctatcggaacccgataccttacccgacccctttaa

SEQ ID NO: 136 - protein, 588 aa, synthetic construct
TAPTGKRIDDHFPKRKKARTEEDSKPSTSSDAEAGPSGSQQLQIPAQPASSLGADTMSAGGGGPLGDNNQGADGVGNASGDWHCDSTWMGDRVVTKSTRTWVLPSYNNHQYREIKSGSVDGSNANAYFGYSTPWGYFDFNRFHSHWSPRDWQRLINNYWGFRPRSLRVKIFNIQVKEVTVQDSTTTIANNLTSTVQVFTDDDYQLPYVVGNGTEGCLPAFPPQVFTLPQYGYATLNRDNTENPTERSSFFCLEYFPSKMLRTGNNFEFTYNFEEVPFHSSFAPSQNLFKLANPLYDQYLYRFVSTNNTGGVQFNKNLAGRYANTYKNWFPGPMGRTQGWNLGSGVNRASVSAFATTNRMELEGASYQVPPQPNGMTNNLQGSNTYALENTMIFNSQPANPGTTATYLEGNMLITSESETQPVNRVAYNVGGQMATNNQSSTTAPATGTYNLQEIVPGSVWMERDVYLQGPIWAKIPETGAHFHPSPAMGGFGLKHPPPMMLIKNTPVPGNITSFSDVPVSSFITQYSTGQVTVEMEWELKKENSKRWNPEIQYTNNYNDPQFVDFAPDSTGEYRTTRPIGTRYLTRPL

SEQ ID NO: 137 - DNA, 1599 bp, synthetic construct
  source 1..1599: mol_type = other DNA
atgtctgcgggaggtggcggcccattgggcgacaataaccaaggtgccgatggagtgggcaatgcctcgggagattggcattgcgattccacgtggatgggggacagagtcgtcaccaagtccacccgaacctgggtgctgcccagctacaacaaccaccagtaccgagagatcaaaagcggctccgtcgacggaagcaacgccaacgcctactttggatacagcaccccctgggggtactttgactttaaccgcttccacagccactggagcccccgagactggcaaagactcatcaacaactactggggcttcagaccccggtccctcagagtcaaaatcttcaacattcaagtcaaagaggtcacggtgcaggactccaccaccaccatcgccaacaacctcacctccaccgtccaagtgtttacggacgacgactaccagctgccctacgtcgtcggcaacgggaccgagggatgcctgccggccttccctccgcaggtctttacgctgccgcagtacggttacgcgacgctgaaccgcgacaacacagaaaatcccaccgagaggagcagcttcttctgcctagagtactttcccagcaagatgctgagaacgggcaacaactttgagtttacctacaactttgaggaggtgcccttccactccagcttcgctcccagtcagaacctcttcaagctggccaacccgctgtacgaccagtacttgtaccgcttcgtgagcacaaataacactggcggagtccagttcaacaagaacctggccgggagatacgccaacacctacaaaaactggttcccggggcccatgggccgaacccagggctggaacctgggctccggggtcaaccgcgccagtgtcagcgccttcgccacgaccaataggatggagctcgagggcgcgagttaccaggtgcccccgcagccgaacggcatgaccaacaacctccagggcagcaacacctatgccctggagaacactatgatcttcaacagccagccggcgaacccgggcaccaccgccacgtacctcgagggcaacatgctcatcaccagcgagagcgagacgcagccggtgaaccgcgtggcgtacaacgtcggcgggcagatggccaccaacaaccagagctccaccactgcccccgcgaccggcacgtacaacctccaggaaatcgtgcccggcagcgtgtggatggagagggacgtgtacctccaaggacccatctgggccaagatcccagagacgggggcgcactttcacccctctccggccatgggcggattcggactcaaacacccaccgcccatgatgctcatcaagaacacgcctgtgcccggaaatatcaccagcttctcggacgtgcccgtcagcagcttcatcacccagtacagcaccgggcaggtcaccgtggagatggagtgggagctcaagaaggaaaactccaagaggtggaacccagagatccagtacacaaacaactacaacgacccccagtttgtggactttgccccggacagcaccggggaatacagaaccaccagacctatcggaacccgataccttacccgacccctttaa

SEQ ID NO: 138 - protein, 532 aa, synthetic construct
MSAGGGGPLGDNNQGADGVGNASGDWHCDSTWMGDRVVTKSTRTWVLPSYNNHQYREIKSGSVDGSNANAYFGYSTPWGYFDFNRFHSHWSPRDWQRLINNYWGFRPRSLRVKIFNIQVKEVTVQDSTTTIANNLTSTVQVFTDDDYQLPYVVGNGTEGCLPAFPPQVFTLPQYGYATLNRDNTENPTERSSFFCLEYFPSKMLRTGNNFEFTYNFEEVPFHSSFAPSQNLFKLANPLYDQYLYRFVSTNNTGGVQFNKNLAGRYANTYKNWFPGPMGRTQGWNLGSGVNRASVSAFATTNRMELEGASYQVPPQPNGMTNNLQGSNTYALENTMIFNSQPANPGTTATYLEGNMLITSESETQPVNRVAYNVGGQMATNNQSSTTAPATGTYNLQEIVPGSVWMERDVYLQGPIWAKIPETGAHFHPSPAMGGFGLKHPPPMMLIKNTPVPGNITSFSDVPVSSFITQYSTGQVTVEMEWELKKENSKRWNPEIQYTNNYNDPQFVDFAPDSTGEYRTTRPIGTRYLTRPL

SEQ ID NO: 139 - DNA, 2175 bp, synthetic construct
  source 1..2175: mol_type = other DNA
atggcttttgttgatcaccctccagattggttggaagaagttggtgaaggtcttcgcgagtttttgggccttgaagcgggcccaccgaaaccaaaacccaatcagcagcatcaagatcaagcccgtggtcttgtgctgcctggttataactatctcggacccggaaacggtctcgatcgaggagagcctgtcaacagggcagacgaggtcgcgcgagagcacgacatctcgtacaacgagcagcttgaggcgggagacaacccctacctcaagtacaaccacgcggacgccgagtttcaggagaagctcgccgacgacacatccttcgggggaaacctcggaaaggcagtctttcaggccaagaaaagggttctcgaaccttttggcctggttgaagagggtgctaagacggcccctaccggaaagcggatagacgaccactttccaaaaagaaagaaggctcggaccgaagaggactccaagccttccacctcgtcagacgccgaagctggacccagcggatcccagcagctgcaaatcccagcccaaccagcctcaagtttgggagctgatacaatgtctgcgggaggtggcggcccattgggcgacaataaccaaggtgccgatggagtgggcaatgcctcgggagattggcattgcgattccacgtggatgggggacagagtcgtcaccaagtccacccgaacctgggtgctgcccagctacaacaaccaccagtaccgagagatcaaaagcggctccgtcgacggaagcaacgccaacgcctactttggatacagcaccccctgggggtactttgactttaaccgcttccacagccactggagcccccgagactggcaaagactcatcaacaactactggggcttcagaccccggtccctcagagtcaaaatcttcaacattcaagtcaaagaggtcacggtgcaggactccaccaccaccatcgccaacaacctcacctccaccgtccaagtgtttacggacgacgactaccagctgccctacgtcgtcggcaacgggaccgagggatgcctgccggccttccctccgcaggtctttacgctgccgcagtacggttacgcgacgctgaaccgcgacaacacagaaaatcccaccgagaggagcagcttcttctgcctagagtactttcccagcaagatgctgagaacgggcaacaactttgagtttacctacaactttgaggaggtgcccttccactccagcttcgctcccagtcagaacctcttcaagctggccaacccgctgtacgaccagtacttgtaccgcttcgtgagcacaaataacactggcggagtccagttcaacaagaacctggccgggagatacgccaacacctacaaaaactggttcccggggcccatgggccgaacccagggctggaacctgggctccggggtcaaccgcgccagtgtcagcgccttcgccacgaccaataggatggagctcgagggcgcgagttaccaggtgcccccgcagccgaacggcatgaccaacaacctccagggcagcaacacctatgccctggagaacactatgatcttcaacagccagccggcgaacccgggcaccaccgccacgtacctcgagggcaacatgctcatcaccagcgagagcgagacgcagccggtgaaccgcgtggcgtacaacgtcggcgggcagatggccaccaacaaccagagctccaccactgcccccgcgaccggcacgtacaacctccaggaaatcgtgcccggcagcgtgtggatggagagggacgtgtacctccaaggacccatctgggccaagatcccagagacgggggcgcactttcacccctctccggccatgggcggattcggactcaaacacccaccgcccatgatgctcatcaagaacacgcctgtgcccggaaatatcaccagcttctcggacgtgcccgtcagcagcttcatcacccagtacagcaccgggcaggtcaccgtggagatggagtgggagctcaagaaggaaaactccaagaggtggaacccagagatccagtacacaaacaactacaacgacccccagtttgtggactttgccccggacagcaccggggaatacagaagcaccagacctatcggaacccgataccttacccgacccctttaa

SEQ ID NO: 140 - protein, 724 aa, synthetic construct
MAFVDHPPDWLEEVGEGLREFLGLEAGPPKPKPNQQHQDQARGLVLPGYNYLGPGNGLDRGEPVNRADEVAREHDISYNEQLEAGDNPYLKYNHADAEFQEKLADDTSFGGNLGKAVFQAKKRVLEPFGLVEEGAKTAPTGKRIDDHFPKRKKARTEEDSKPSTSSDAEAGPSGSQQLQIPAQPASSLGADTMSAGGGGPLGDNNQGADGVGNASGDWHCDSTWMGDRVVTKSTRTWVLPSYNNHQYREIKSGSVDGSNANAYFGYSTPWGYFDFNRFHSHWSPRDWQRLINNYWGFRPRSLRVKIFNIQVKEVTVQDSTTTIANNLTSTVQVFTDDDYQLPYVVGNGTEGCLPAFPPQVFTLPQYGYATLNRDNTENPTERSSFFCLEYFPSKMLRTGNNFEFTYNFEEVPFHSSFAPSQNLFKLANPLYDQYLYRFVSTNNTGGVQFNKNLAGRYANTYKNWFPGPMGRTQGWNLGSGVNRASVSAFATTNRMELEGASYQVPPQPNGMTNNLQGSNTYALENTMIFNSQPANPGTTATYLEGNMLITSESETQPVNRVAYNVGGQMATNNQSSTTAPATGTYNLQEIVPGSVWMERDVYLQGPIWAKIPETGAHFHPSPAMGGFGLKHPPPMMLIKNTPVPGNITSFSDVPVSSFITQYSTGQVTVEMEWELKKENSKRWNPEIQYTNNYNDPQFVDFAPDSTGEYRSTRPIGTRYLTRPL

SEQ ID NO: 141 - DNA, 1767 bp, synthetic construct
  source 1..1767: mol_type = other DNA
acggcccctaccggaaagcggatagacgaccactttccaaaaagaaagaaggctcggaccgaagaggactccaagccttccacctcgtcagacgccgaagctggacccagcggatcccagcagctgcaaatcccagcccaaccagcctcaagtttgggagctgatacaatgtctgcgggaggtggcggcccattgggcgacaataaccaaggtgccgatggagtgggcaatgcctcgggagattggcattgcgattccacgtggatgggggacagagtcgtcaccaagtccacccgaacctgggtgctgcccagctacaacaaccaccagtaccgagagatcaaaagcggctccgtcgacggaagcaacgccaacgcctactttggatacagcaccccctgggggtactttgactttaaccgcttccacagccactggagcccccgagactggcaaagactcatcaacaactactggggcttcagaccccggtccctcagagtcaaaatcttcaacattcaagtcaaagaggtcacggtgcaggactccaccaccaccatcgccaacaacctcacctccaccgtccaagtgtttacggacgacgactaccagctgccctacgtcgtcggcaacgggaccgagggatgcctgccggccttccctccgcaggtctttacgctgccgcagtacggttacgcgacgctgaaccgcgacaacacagaaaatcccaccgagaggagcagcttcttctgcctagagtactttcccagcaagatgctgagaacgggcaacaactttgagtttacctacaactttgaggaggtgcccttccactccagcttcgctcccagtcagaacctcttcaagctggccaacccgctgtacgaccagtacttgtaccgcttcgtgagcacaaataacactggcggagtccagttcaacaagaacctggccgggagatacgccaacacctacaaaaactggttcccggggcccatgggccgaacccagggctggaacctgggctccggggtcaaccgcgccagtgtcagcgccttcgccacgaccaataggatggagctcgagggcgcgagttaccaggtgcccccgcagccgaacggcatgaccaacaacctccagggcagcaacacctatgccctggagaacactatgatcttcaacagccagccggcgaacccgggcaccaccgccacgtacctcgagggcaacatgctcatcaccagcgagagcgagacgcagccggtgaaccgcgtggcgtacaacgtcggcgggcagatggccaccaacaaccagagctccaccactgcccccgcgaccggcacgtacaacctccaggaaatcgtgcccggcagcgtgtggatggagagggacgtgtacctccaaggacccatctgggccaagatcccagagacgggggcgcactttcacccctctccggccatgggcggattcggactcaaacacccaccgcccatgatgctcatcaagaacacgcctgtgcccggaaatatcaccagcttctcggacgtgcccgtcagcagcttcatcacccagtacagcaccgggcaggtcaccgtggagatggagtgggagctcaagaaggaaaactccaagaggtggaacccagagatccagtacacaaacaactacaacgacccccagtttgtggactttgccccggacagcaccggggaatacagaagcaccagacctatcggaacccgataccttacccgacccctttaa

SEQ ID NO: 142 - protein, 588 aa, synthetic construct
TAPTGKRIDDHFPKRKKARTEEDSKPSTSSDAEAGPSGSQQLQIPAQPASSLGADTMSAGGGGPLGDNNQGADGVGNASGDWHCDSTWMGDRVVTKSTRTWVLPSYNNHQYREIKSGSVDGSNANAYFGYSTPWGYFDFNRFHSHWSPRDWQRLINNYWGFRPRSLRVKIFNIQVKEVTVQDSTTTIANNLTSTVQVFTDDDYQLPYVVGNGTEGCLPAFPPQVFTLPQYGYATLNRDNTENPTERSSFFCLEYFPSKMLRTGNNFEFTYNFEEVPFHSSFAPSQNLFKLANPLYDQYLYRFVSTNNTGGVQFNKNLAGRYANTYKNWFPGPMGRTQGWNLGSGVNRASVSAFATTNRMELEGASYQVPPQPNGMTNNLQGSNTYALENTMIFNSQPANPGTTATYLEGNMLITSESETQPVNRVAYNVGGQMATNNQSSTTAPATGTYNLQEIVPGSVWMERDVYLQGPIWAKIPETGAHFHPSPAMGGFGLKHPPPMMLIKNTPVPGNITSFSDVPVSSFITQYSTGQVTVEMEWELKKENSKRWNPEIQYTNNYNDPQFVDFAPDSTGEYRSTRPIGTRYLTRPL

SEQ ID NO: 143 - DNA, 1599 bp, synthetic construct
  source 1..1599: mol_type = other DNA
atgtctgcgggaggtggcggcccattgggcgacaataaccaaggtgccgatggagtgggcaatgcctcgggagattggcattgcgattccacgtggatgggggacagagtcgtcaccaagtccacccgaacctgggtgctgcccagctacaacaaccaccagtaccgagagatcaaaagcggctccgtcgacggaagcaacgccaacgcctactttggatacagcaccccctgggggtactttgactttaaccgcttccacagccactggagcccccgagactggcaaagactcatcaacaactactggggcttcagaccccggtccctcagagtcaaaatcttcaacattcaagtcaaagaggtcacggtgcaggactccaccaccaccatcgccaacaacctcacctccaccgtccaagtgtttacggacgacgactaccagctgccctacgtcgtcggcaacgggaccgagggatgcctgccggccttccctccgcaggtctttacgctgccgcagtacggttacgcgacgctgaaccgcgacaacacagaaaatcccaccgagaggagcagcttcttctgcctagagtactttcccagcaagatgctgagaacgggcaacaactttgagtttacctacaactttgaggaggtgcccttccactccagcttcgctcccagtcagaacctcttcaagctggccaacccgctgtacgaccagtacttgtaccgcttcgtgagcacaaataacactggcggagtccagttcaacaagaacctggccgggagatacgccaacacctacaaaaactggttcccggggcccatgggccgaacccagggctggaacctgggctccggggtcaaccgcgccagtgtcagcgccttcgccacgaccaataggatggagctcgagggcgcgagttaccaggtgcccccgcagccgaacggcatgaccaacaacctccagggcagcaacacctatgccctggagaacactatgatcttcaacagccagccggcgaacccgggcaccaccgccacgtacctcgagggcaacatgctcatcaccagcgagagcgagacgcagccggtgaaccgcgtggcgtacaacgtcggcgggcagatggccaccaacaaccagagctccaccactgcccccgcgaccggcacgtacaacctccaggaaatcgtgcccggcagcgtgtggatggagagggacgtgtacctccaaggacccatctgggccaagatcccagagacgggggcgcactttcacccctctccggccatgggcggattcggactcaaacacccaccgcccatgatgctcatcaagaacacgcctgtgcccggaaatatcaccagcttctcggacgtgcccgtcagcagcttcatcacccagtacagcaccgggcaggtcaccgtggagatggagtgggagctcaagaaggaaaactccaagaggtggaacccagagatccagtacacaaacaactacaacgacccccagtttgtggactttgccccggacagcaccggggaatacagaagcaccagacctatcggaacccgataccttacccgacccctttaa

SEQ ID NO: 144 - protein, 532 aa, synthetic construct
MSAGGGGPLGDNNQGADGVGNASGDWHCDSTWMGDRVVTKSTRTWVLPSYNNHQYREIKSGSVDGSNANAYFGYSTPWGYFDFNRFHSHWSPRDWQRLINNYWGFRPRSLRVKIFNIQVKEVTVQDSTTTIANNLTSTVQVFTDDDYQLPYVVGNGTEGCLPAFPPQVFTLPQYGYATLNRDNTENPTERSSFFCLEYFPSKMLRTGNNFEFTYNFEEVPFHSSFAPSQNLFKLANPLYDQYLYRFVSTNNTGGVQFNKNLAGRYANTYKNWFPGPMGRTQGWNLGSGVNRASVSAFATTNRMELEGASYQVPPQPNGMTNNLQGSNTYALENTMIFNSQPANPGTTATYLEGNMLITSESETQPVNRVAYNVGGQMATNNQSSTTAPATGTYNLQEIVPGSVWMERDVYLQGPIWAKIPETGAHFHPSPAMGGFGLKHPPPMMLIKNTPVPGNITSFSDVPVSSFITQYSTGQVTVEMEWELKKENSKRWNPEIQYTNNYNDPQFVDFAPDSTGEYRSTRPIGTRYLTRPL

SEQ ID NO: 145 - DNA, 2175 bp, synthetic construct
  source 1..2175: mol_type = other DNA
atgtcttttgttgatcaccctccagattggttggaagaagttggtgaaggtcttcgcgagtttttgggccttgaagcgggcccaccgaaaccaaaacccaatcagcagcatcaagatcaagcccgtggtcttgtgctgcctggttataactatctcggacccggaaacggtctcgatcgaggagagcctgtcaacagggcagacgaggtcgcgcgagagcacgacatctcgtacaacgagcagcttgaggcgggagacaacccctacctcaagtacaaccacgcggacgccgagtttcaggagaagctcgccgacgacacatccttcgggggaaacctcggaaaggcagtctttcaggccaagaaaagggttctcgaaccttttggcctggttgaagagggtgctaagacggcccctaccggaaagcggatagacgaccactttccaaaaagaaagaaggctcggaccgaagaggactccaagccttccacctcgtcagacgccgaagctggacccagcggatcccagcagctgcaaatcccagcccaaccagcctcaagtttgggagctgatacaatgtctgcgggaggtggcggcccattgggcgacaataaccaaggtgccgatggagtgggcaatgcctcgggagattggcattgcgattccacgtggatgggggacagagtcgtcaccaagtccacccgaacctgggtgctgcccagctacaacaaccaccagtaccgagagatcaaaagcggctccgtcgacggaagcaacgccaacgcctactttggatacagcaccccctgggggtactttgactttaaccgcttccacagccactggagcccccgagactggcaaagactcatcaacaactactggggcttcagaccccggtccctcagagtcaaaatcttcaacattcaagtcaaagaggtcacggtgcaggactccaccaccaccatcgccaacaacctcacctccaccgtccaagtgtttacggacgacgactaccagctgccctacgtcgtcggcaacgggaccgagggatgcctgccggccttccctccgcaggtctttacgctgccgcagtacggttacgcgacgctgaaccgcgacaacacagaaaatcccaccgagaggagcagcttcttctgcctagagtactttcccagcaagatgctgagaacgggcaacaactttgagtttacctacaactttgaggaggtgcccttccactccagcttcgctcccagtcagaacctcttcaagctggccaacccgctggtggaccagtacttgtaccgcttcgtgagcacaaataacactggcggagtccagttcaacaagaacctggccgggagatacgccaacacctacaaaaactggttcccggggcccatgggccgaacccagggctggaacctgggctccggggtcaaccgcgccagtgtcagcgccttcgccacgaccaataggatggagctcgagggcgcgagttaccaggtgcccccgcagccgaacggcatgaccaacaacctccagggcagcaacacctatgccctggagaacactatgatcttcaacagccagccggcgaacccgggcaccaccgccacgtacctcgagggcaacatgctcatcaccagcgagagcgagacgcagccggtgaaccgcgtggcgtacaacgtcggcgggcagatggccaccaacaaccagagctccaccactgcccccgcgaccggcacgtacaacctccaggaaatcgtgcccggcagcgtgtggatggagagggacgtgtacctccaaggacccatctgggccaagatcccagagacgggggaccactttcacccctctccggccatgggcggattcggactcaaacacccaccgcccatgatgctcatcaagaacacgcctgtgcccggaaatatcaccagcttctcggacgtgcccgtcagcagcttcatcacccagtacagcaccgggcaggtcaccgtggagatggagtgggagctcaagaaggaaaactccaagaggtggaacccagagatccagtacacaaacaactacaacgacccccagtttgtggactttgccccggacagcaccggggaatacagaaccaccagacctatcggaacccgataccttacccgacccctttaa

SEQ ID NO: 146 - protein, 724 aa, synthetic construct
MSFVDHPPDWLEEVGEGLREFLGLEAGPPKPKPNQQHQDQARGLVLPGYNYLGPGNGLDRGEPVNRADEVAREHDISYNEQLEAGDNPYLKYNHADAEFQEKLADDTSFGGNLGKAVFQAKKRVLEPFGLVEEGAKTAPTGKRIDDHFPKRKKARTEEDSKPSTSSDAEAGPSGSQQLQIPAQPASSLGADTMSAGGGGPLGDNNQGADGVGNASGDWHCDSTWMGDRVVTKSTRTWVLPSYNNHQYREIKSGSVDGSNANAYFGYSTPWGYFDFNRFHSHWSPRDWQRLINNYWGFRPRSLRVKIFNIQVKEVTVQDSTTTIANNLTSTVQVFTDDDYQLPYVVGNGTEGCLPAFPPQVFTLPQYGYATLNRDNTENPTERSSFFCLEYFPSKMLRTGNNFEFTYNFEEVPFHSSFAPSQNLFKLANPLVDQYLYRFVSTNNTGGVQFNKNLAGRYANTYKNWFPGPMGRTQGWNLGSGVNRASVSAFATTNRMELEGASYQVPPQPNGMTNNLQGSNTYALENTMIFNSQPANPGTTATYLEGNMLITSESETQPVNRVAYNVGGQMATNNQSSTTAPATGTYNLQEIVPGSVWMERDVYLQGPIWAKIPETGDHFHPSPAMGGFGLKHPPPMMLIKNTPVPGNITSFSDVPVSSFITQYSTGQVTVEMEWELKKENSKRWNPEIQYTNNYNDPQFVDFAPDSTGEYRTTRPIGTRYLTRPL

SEQ ID NO: 147 - DNA, 1767 bp, synthetic construct
  source 1..1767: mol_type = other DNA
acggcccctaccggaaagcggatagacgaccactttccaaaaagaaagaaggctcggaccgaagaggactccaagccttccacctcgtcagacgccgaagctggacccagcggatcccagcagctgcaaatcccagcccaaccagcctcaagtttgggagctgatacaatgtctgcgggaggtggcggcccattgggcgacaataaccaaggtgccgatggagtgggcaatgcctcgggagattggcattgcgattccacgtggatgggggacagagtcgtcaccaagtccacccgaacctgggtgctgcccagctacaacaaccaccagtaccgagagatcaaaagcggctccgtcgacggaagcaacgccaacgcctactttggatacagcaccccctgggggtactttgactttaaccgcttccacagccactggagcccccgagactggcaaagactcatcaacaactactggggcttcagaccccggtccctcagagtcaaaatcttcaacattcaagtcaaagaggtcacggtgcaggactccaccaccaccatcgccaacaacctcacctccaccgtccaagtgtttacggacgacgactaccagctgccctacgtcgtcggcaacgggaccgagggatgcctgccggccttccctccgcaggtctttacgctgccgcagtacggttacgcgacgctgaaccgcgacaacacagaaaatcccaccgagaggagcagcttcttctgcctagagtactttcccagcaagatgctgagaacgggcaacaactttgagtttacctacaactttgaggaggtgcccttccactccagcttcgctcccagtcagaacctcttcaagctggccaacccgctggtggaccagtacttgtaccgcttcgtgagcacaaataacactggcggagtccagttcaacaagaacctggccgggagatacgccaacacctacaaaaactggttcccggggcccatgggccgaacccagggctggaacctgggctccggggtcaaccgcgccagtgtcagcgccttcgccacgaccaataggatggagctcgagggcgcgagttaccaggtgcccccgcagccgaacggcatgaccaacaacctccagggcagcaacacctatgccctggagaacactatgatcttcaacagccagccggcgaacccgggcaccaccgccacgtacctcgagggcaacatgctcatcaccagcgagagcgagacgcagccggtgaaccgcgtggcgtacaacgtcggcgggcagatggccaccaacaaccagagctccaccactgcccccgcgaccggcacgtacaacctccaggaaatcgtgcccggcagcgtgtggatggagagggacgtgtacctccaaggacccatctgggccaagatcccagagacgggggaccactttcacccctctccggccatgggcggattcggactcaaacacccaccgcccatgatgctcatcaagaacacgcctgtgcccggaaatatcaccagcttctcggacgtgcccgtcagcagcttcatcacccagtacagcaccgggcaggtcaccgtggagatggagtgggagctcaagaaggaaaactccaagaggtggaacccagagatccagtacacaaacaactacaacgacccccagtttgtggactttgccccggacagcaccggggaatacagaaccaccagacctatcggaacccgataccttacccgacccctttaa

SEQ ID NO: 148 - protein, 588 aa, synthetic construct
TAPTGKRIDDHFPKRKKARTEEDSKPSTSSDAEAGPSGSQQLQIPAQPASSLGADTMSAGGGGPLGDNNQGADGVGNASGDWHCDSTWMGDRVVTKSTRTWVLPSYNNHQYREIKSGSVDGSNANAYFGYSTPWGYFDFNRFHSHWSPRDWQRLINNYWGFRPRSLRVKIFNIQVKEVTVQDSTTTIANNLTSTVQVFTDDDYQLPYVVGNGTEGCLPAFPPQVFTLPQYGYATLNRDNTENPTERSSFFCLEYFPSKMLRTGNNFEFTYNFEEVPFHSSFAPSQNLFKLANPLVDQYLYRFVSTNNTGGVQFNKNLAGRYANTYKNWFPGPMGRTQGWNLGSGVNRASVSAFATTNRMELEGASYQVPPQPNGMTNNLQGSNTYALENTMIFNSQPANPGTTATYLEGNMLITSESETQPVNRVAYNVGGQMATNNQSSTTAPATGTYNLQEIVPGSVWMERDVYLQGPIWAKIPETGDHFHPSPAMGGFGLKHPPPMMLIKNTPVPGNITSFSDVPVSSFITQYSTGQVTVEMEWELKKENSKRWNPEIQYTNNYNDPQFVDFAPDSTGEYRTTRPIGTRYLTRPL

SEQ ID NO: 149 - DNA, 1599 bp, synthetic construct
  source 1..1599: mol_type = other DNA
atgtctgcgggaggtggcggcccattgggcgacaataaccaaggtgccgatggagtgggcaatgcctcgggagattggcattgcgattccacgtggatgggggacagagtcgtcaccaagtccacccgaacctgggtgctgcccagctacaacaaccaccagtaccgagagatcaaaagcggctccgtcgacggaagcaacgccaacgcctactttggatacagcaccccctgggggtactttgactttaaccgcttccacagccactggagcccccgagactggcaaagactcatcaacaactactggggcttcagaccccggtccctcagagtcaaaatcttcaacattcaagtcaaagaggtcacggtgcaggactccaccaccaccatcgccaacaacctcacctccaccgtccaagtgtttacggacgacgactaccagctgccctacgtcgtcggcaacgggaccgagggatgcctgccggccttccctccgcaggtctttacgctgccgcagtacggttacgcgacgctgaaccgcgacaacacagaaaatcccaccgagaggagcagcttcttctgcctagagtactttcccagcaagatgctgagaacgggcaacaactttgagtttacctacaactttgaggaggtgcccttccactccagcttcgctcccagtcagaacctcttcaagctggccaacccgctggtggaccagtacttgtaccgcttcgtgagcacaaataacactggcggagtccagttcaacaagaacctggccgggagatacgccaacacctacaaaaactggttcccggggcccatgggccgaacccagggctggaacctgggctccggggtcaaccgcgccagtgtcagcgccttcgccacgaccaataggatggagctcgagggcgcgagttaccaggtgcccccgcagccgaacggcatgaccaacaacctccagggcagcaacacctatgccctggagaacactatgatcttcaacagccagccggcgaacccgggcaccaccgccacgtacctcgagggcaacatgctcatcaccagcgagagcgagacgcagccggtgaaccgcgtggcgtacaacgtcggcgggcagatggccaccaacaaccagagctccaccactgcccccgcgaccggcacgtacaacctccaggaaatcgtgcccggcagcgtgtggatggagagggacgtgtacctccaaggacccatctgggccaagatcccagagacgggggaccactttcacccctctccggccatgggcggattcggactcaaacacccaccgcccatgatgctcatcaagaacacgcctgtgcccggaaatatcaccagcttctcggacgtgcccgtcagcagcttcatcacccagtacagcaccgggcaggtcaccgtggagatggagtgggagctcaagaaggaaaactccaagaggtggaacccagagatccagtacacaaacaactacaacgacccccagtttgtggactttgccccggacagcaccggggaatacagaaccaccagacctatcggaacccgataccttacccgacccctttaa

SEQ ID NO: 150 - protein, 532 aa, synthetic construct
MSAGGGGPLGDNNQGADGVGNASGDWHCDSTWMGDRVVTKSTRTWVLPSYNNHQYREIKSGSVDGSNANAYFGYSTPWGYFDFNRFHSHWSPRDWQRLINNYWGFRPRSLRVKIFNIQVKEVTVQDSTTTIANNLTSTVQVFTDDDYQLPYVVGNGTEGCLPAFPPQVFTLPQYGYATLNRDNTENPTERSSFFCLEYFPSKMLRTGNNFEFTYNFEEVPFHSSFAPSQNLFKLANPLVDQYLYRFVSTNNTGGVQFNKNLAGRYANTYKNWFPGPMGRTQGWNLGSGVNRASVSAFATTNRMELEGASYQVPPQPNGMTNNLQGSNTYALENTMIFNSQPANPGTTATYLEGNMLITSESETQPVNRVAYNVGGQMATNNQSSTTAPATGTYNLQEIVPGSVWMERDVYLQGPIWAKIPETGDHFHPSPAMGGFGLKHPPPMMLIKNTPVPGNITSFSDVPVSSFITQYSTGQVTVEMEWELKKENSKRWNPEIQYTNNYNDPQFVDFAPDSTGEYRTTRPIGTRYLTRPL

SEQ ID NO: 151 - DNA, 2175 bp, synthetic construct
  source 1..2175: mol_type = other DNA
atggcttttgttgatcaccctccagattggttggaagaagttggtgaaggtcttcgcgagtttttgggccttgaagcgggcccaccgaaaccaaaacccaatcagcagcatcaagatcaagcccgtggtcttgtgctgcctggttataactatctcggacccggaaacggtctcgatcgaggagagcctgtcaacagggcagacgaggtcgcgcgagagcacgacatctcgtacaacgagcagcttgaggcgggagacaacccctacctcaagtacaaccacgcggacgccgagtttcaggagaagctcgccgacgacacatccttcgggggaaacctcggaaaggcagtctttcaggccaagaaaagggttctcgaaccttttggcctggttgaagagggtgctaagacggcccctaccggaaagcggatagacgaccactttccaaaaagaaagaaggctcggaccgaagaggactccaagccttccacctcgtcagacgccgaagctggacccagcggatcccagcagctgcaaatcccagcccaaccagcctcaagtttgggagctgatacaatgtctgcgggaggtggcggcccattgggcgacaataaccaaggtgccgatggagtgggcaatgcctcgggagattggcattgcgattccacgtggatgggggacagagtcgtcaccaagtccacccgaacctgggtgctgcccagctacaacaaccaccagtaccgagagatcaaaagcggctccgtcgacggaagcaacgccaacgcctactttggatacagcaccccctgggggtactttgactttaaccgcttccacagccactggagcccccgagactggcaaagactcatcaacaactactggggcttcagaccccggtccctcagagtcaaaatcttcaacattcaagtcaaagaggtcacggtgcaggactccaccaccaccatcgccaacaacctcacctccaccgtccaagtgtttacggacgacgactaccagctgccctacgtcgtcggcaacgggaccgagggatgcctgccggccttccctccgcaggtctttacgctgccgcagtacggttacgcgacgctgaaccgcgacaacacagaaaatcccaccgagaggagcagcttcttctgcctagagtactttcccagcaagatgctgagaacgggcaacaactttgagtttacctacaactttgaggaggtgcccttccactccagcttcgctcccagtcagaacctcttcaagctggccaacccgctggtggaccagtacttgtaccgcttcgtgagcacaaataacactggcggagtccagttcaacaagaacctggccgggagatacgccaacacctacaaaaactggttcccggggcccatgggccgaacccagggctggaacctgggctccggggtcaaccgcgccagtgtcagcgccttcgccacgaccaataggatggagctcgagggcgcgagttaccaggtgcccccgcagccgaacggcatgaccaacaacctccagggcagcaacacctatgccctggagaacactatgatcttcaacagccagccggcgaacccgggcaccaccgccacgtacctcgagggcaacatgctcatcaccagcgagagcgagacgcagccggtgaaccgcgtggcgtacaacgtcggcgggcagatggccaccaacaaccagagctccaccactgcccccgcgaccggcacgtacaacctccaggaaatcgtgcccggcagcgtgtggatggagagggacgtgtacctccaaggacccatctgggccaagatcccagagacgggggaccactttcacccctctccggccatgggcggattcggactcaaacacccaccgcccatgatgctcatcaagaacacgcctgtgcccggaaatatcaccagcttctcggacgtgcccgtcagcagcttcatcacccagtacagcaccgggcaggtcaccgtggagatggagtgggagctcaagaaggaaaactccaagaggtggaacccagagatccagtacacaaacaactacaacgacccccagtttgtggactttgccccggacagcaccggggaatacagaagcaccagacctatcggaacccgataccttacccgacccctttaa

SEQ ID NO: 152 - protein, 724 aa, synthetic construct
MAFVDHPPDWLEEVGEGLREFLGLEAGPPKPKPNQQHQDQARGLVLPGYNYLGPGNGLDRGEPVNRADEVAREHDISYNEQLEAGDNPYLKYNHADAEFQEKLADDTSFGGNLGKAVFQAKKRVLEPFGLVEEGAKTAPTGKRIDDHFPKRKKARTEEDSKPSTSSDAEAGPSGSQQLQIPAQPASSLGADTMSAGGGGPLGDNNQGADGVGNASGDWHCDSTWMGDRVVTKSTRTWVLPSYNNHQYREIKSGSVDGSNANAYFGYSTPWGYFDFNRFHSHWSPRDWQRLINNYWGFRPRSLRVKIFNIQVKEVTVQDSTTTIANNLTSTVQVFTDDDYQLPYVVGNGTEGCLPAFPPQVFTLPQYGYATLNRDNTENPTERSSFFCLEYFPSKMLRTGNNFEFTYNFEEVPFHSSFAPSQNLFKLANPLVDQYLYRFVSTNNTGGVQFNKNLAGRYANTYKNWFPGPMGRTQGWNLGSGVNRASVSAFATTNRMELEGASYQVPPQPNGMTNNLQGSNTYALENTMIFNSQPANPGTTATYLEGNMLITSESETQPVNRVAYNVGGQMATNNQSSTTAPATGTYNLQEIVPGSVWMERDVYLQGPIWAKIPETGDHFHPSPAMGGFGLKHPPPMMLIKNTPVPGNITSFSDVPVSSFITQYSTGQVTVEMEWELKKENSKRWNPEIQYTNNYNDPQFVDFAPDSTGEYRSTRPIGTRYLTRPL

SEQ ID NO: 153 - DNA, 1767 bp, synthetic construct
  source 1..1767: mol_type = other DNA
acggcccctaccggaaagcggatagacgaccactttccaaaaagaaagaaggctcggaccgaagaggactccaagccttccacctcgtcagacgccgaagctggacccagcggatcccagcagctgcaaatcccagcccaaccagcctcaagtttgggagctgatacaatgtctgcgggaggtggcggcccattgggcgacaataaccaaggtgccgatggagtgggcaatgcctcgggagattggcattgcgattccacgtggatgggggacagagtcgtcaccaagtccacccgaacctgggtgctgcccagctacaacaaccaccagtaccgagagatcaaaagcggctccgtcgacggaagcaacgccaacgcctactttggatacagcaccccctgggggtactttgactttaaccgcttccacagccactggagcccccgagactggcaaagactcatcaacaactactggggcttcagaccccggtccctcagagtcaaaatcttcaacattcaagtcaaagaggtcacggtgcaggactccaccaccaccatcgccaacaacctcacctccaccgtccaagtgtttacggacgacgactaccagctgccctacgtcgtcggcaacgggaccgagggatgcctgccggccttccctccgcaggtctttacgctgccgcagtacggttacgcgacgctgaaccgcgacaacacagaaaatcccaccgagaggagcagcttcttctgcctagagtactttcccagcaagatgctgagaacgggcaacaactttgagtttacctacaactttgaggaggtgcccttccactccagcttcgctcccagtcagaacctcttcaagctggccaacccgctggtggaccagtacttgtaccgcttcgtgagcacaaataacactggcggagtccagttcaacaagaacctggccgggagatacgccaacacctacaaaaactggttcccggggcccatgggccgaacccagggctggaacctgggctccggggtcaaccgcgccagtgtcagcgccttcgccacgaccaataggatggagctcgagggcgcgagttaccaggtgcccccgcagccgaacggcatgaccaacaacctccagggcagcaacacctatgccctggagaacactatgatcttcaacagccagccggcgaacccgggcaccaccgccacgtacctcgagggcaacatgctcatcaccagcgagagcgagacgcagccggtgaaccgcgtggcgtacaacgtcggcgggcagatggccaccaacaaccagagctccaccactgcccccgcgaccggcacgtacaacctccaggaaatcgtgcccggcagcgtgtggatggagagggacgtgtacctccaaggacccatctgggccaagatcccagagacgggggaccactttcacccctctccggccatgggcggattcggactcaaacacccaccgcccatgatgctcatcaagaacacgcctgtgcccggaaatatcaccagcttctcggacgtgcccgtcagcagcttcatcacccagtacagcaccgggcaggtcaccgtggagatggagtgggagctcaagaaggaaaactccaagaggtggaacccagagatccagtacacaaacaactacaacgacccccagtttgtggactttgccccggacagcaccggggaatacagaagcaccagacctatcggaacccgataccttacccgacccctttaa

SEQ ID NO: 154 - protein, 588 aa, synthetic construct
TAPTGKRIDDHFPKRKKARTEEDSKPSTSSDAEAGPSGSQQLQIPAQPASSLGADTMSAGGGGPLGDNNQGADGVGNASGDWHCDSTWMGDRVVTKSTRTWVLPSYNNHQYREIKSGSVDGSNANAYFGYSTPWGYFDFNRFHSHWSPRDWQRLINNYWGFRPRSLRVKIFNIQVKEVTVQDSTTTIANNLTSTVQVFTDDDYQLPYVVGNGTEGCLPAFPPQVFTLPQYGYATLNRDNTENPTERSSFFCLEYFPSKMLRTGNNFEFTYNFEEVPFHSSFAPSQNLFKLANPLVDQYLYRFVSTNNTGGVQFNKNLAGRYANTYKNWFPGPMGRTQGWNLGSGVNRASVSAFATTNRMELEGASYQVPPQPNGMTNNLQGSNTYALENTMIFNSQPANPGTTATYLEGNMLITSESETQPVNRVAYNVGGQMATNNQSSTTAPATGTYNLQEIVPGSVWMERDVYLQGPIWAKIPETGDHFHPSPAMGGFGLKHPPPMMLIKNTPVPGNITSFSDVPVSSFITQYSTGQVTVEMEWELKKENSKRWNPEIQYTNNYNDPQFVDFAPDSTGEYRSTRPIGTRYLTRPL

SEQ ID NO: 155 - DNA, 1599 bp, synthetic construct
  source 1..1599: mol_type = other DNA
atgtctgcgggaggtggcggcccattgggcgacaataaccaaggtgccgatggagtgggcaatgcctcgggagattggcattgcgattccacgtggatgggggacagagtcgtcaccaagtccacccgaacctgggtgctgcccagctacaacaaccaccagtaccgagagatcaaaagcggctccgtcgacggaagcaacgccaacgcctactttggatacagcaccccctgggggtactttgactttaaccgcttccacagccactggagcccccgagactggcaaagactcatcaacaactactggggcttcagaccccggtccctcagagtcaaaatcttcaacattcaagtcaaagaggtcacggtgcaggactccaccaccaccatcgccaacaacctcacctccaccgtccaagtgtttacggacgacgactaccagctgccctacgtcgtcggcaacgggaccgagggatgcctgccggccttccctccgcaggtctttacgctgccgcagtacggttacgcgacgctgaaccgcgacaacacagaaaatcccaccgagaggagcagcttcttctgcctagagtactttcccagcaagatgctgagaacgggcaacaactttgagtttacctacaactttgaggaggtgcccttccactccagcttcgctcccagtcagaacctcttcaagctggccaacccgctggtggaccagtacttgtaccgcttcgtgagcacaaataacactggcggagtccagttcaacaagaacctggccgggagatacgccaacacctacaaaaactggttcccggggcccatgggccgaacccagggctggaacctgggctccggggtcaaccgcgccagtgtcagcgccttcgccacgaccaataggatggagctcgagggcgcgagttaccaggtgcccccgcagccgaacggcatgaccaacaacctccagggcagcaacacctatgccctggagaacactatgatcttcaacagccagccggcgaacccgggcaccaccgccacgtacctcgagggcaacatgctcatcaccagcgagagcgagacgcagccggtgaaccgcgtggcgtacaacgtcggcgggcagatggccaccaacaaccagagctccaccactgcccccgcgaccggcacgtacaacctccaggaaatcgtgcccggcagcgtgtggatggagagggacgtgtacctccaaggacccatctgggccaagatcccagagacgggggaccactttcacccctctccggccatgggcggattcggactcaaacacccaccgcccatgatgctcatcaagaacacgcctgtgcccggaaatatcaccagcttctcggacgtgcccgtcagcagcttcatcacccagtacagcaccgggcaggtcaccgtggagatggagtgggagctcaagaaggaaaactccaagaggtggaacccagagatccagtacacaaacaactacaacgacccccagtttgtggactttgccccggacagcaccggggaatacagaagcaccagacctatcggaacccgataccttacccgacccctttaa

SEQ ID NO: 156 - protein, 532 aa, synthetic construct
MSAGGGGPLGDNNQGADGVGNASGDWHCDSTWMGDRVVTKSTRTWVLPSYNNHQYREIKSGSVDGSNANAYFGYSTPWGYFDFNRFHSHWSPRDWQRLINNYWGFRPRSLRVKIFNIQVKEVTVQDSTTTIANNLTSTVQVFTDDDYQLPYVVGNGTEGCLPAFPPQVFTLPQYGYATLNRDNTENPTERSSFFCLEYFPSKMLRTGNNFEFTYNFEEVPFHSSFAPSQNLFKLANPLVDQYLYRFVSTNNTGGVQFNKNLAGRYANTYKNWFPGPMGRTQGWNLGSGVNRASVSAFATTNRMELEGASYQVPPQPNGMTNNLQGSNTYALENTMIFNSQPANPGTTATYLEGNMLITSESETQPVNRVAYNVGGQMATNNQSSTTAPATGTYNLQEIVPGSVWMERDVYLQGPIWAKIPETGDHFHPSPAMGGFGLKHPPPMMLIKNTPVPGNITSFSDVPVSSFITQYSTGQVTVEMEWELKKENSKRWNPEIQYTNNYNDPQFVDFAPDSTGEYRSTRPIGTRYLTRPL

SEQ ID NO: 157 - DNA, 2175 bp, synthetic construct
  source 1..2175: mol_type = other DNA
atgtcttttgttgatcaccctccagattggttggaagaagttggtgaaggtcttcgcgagtttttgggccttgaagcgggcccaccgaaaccaaaacccaatcagcagcatcaagatcaagcccgtggtcttgtgctgcctggttataactatctcggacccggaaacggtctcgatcgaggagagcctgtcaacagggcagacgaggtcgcgcgagagcacgacatctcgtacaacgagcagcttgaggcgggagacaacccctacctcaagtacaaccacgcggacgccgagtttcaggagaagctcgccgacgacacatccttcgggggaaacctcggaaaggcagtctttcaggccaagaaaagggttctcgaaccttttggcctggttgaagagggtgctaagacggcccctaccggaaagcggatagacgaccactttccaaaaagaaagaaggctcggaccgaagaggactccaagccttccacctcgtcagacgccgaagctggacccagcggatcccagcagctgcaaatcccagcccaaccagcctcaagtttgggagctgatacaatgtctgcgggaggtggcggcccattgggcgacaataaccaaggtgccgatggagtgggcaatgcctcgggagattggcattgcgattccacgtggatgggggacagagtcgtcaccaagtccacccgaacctgggtgctgcccagctacaacaaccaccagtaccgagagatcaaaagcggctccgtcgacggaagcaacgccaacgcctactttggatacagcaccccctgggggtactttgactttaaccgcttccacagccactggagcccccgagactggcaaagactcatcaacaactactggggcttcagaccccggtccctcagagtcaaaatcttcaacattcaagtcaaagaggtcacggtgcaggactccaccaccaccatcgccaacaacctcacctccaccgtccaagtgtttacggacgacgactaccagctgccctacgtcgtcggcaacgggaccgagggatgcctgccggccttccctccgcaggtctttacgctgccgcagtacggttacgcgacgctgaaccgcgacaacacagaaaatcccaccgagaggagcagcttcttctgcctagagtactttcccagcaagatgctgagaacgggcaacaactttgagtttacctacaactttgaggaggtgcccttccactccagcttcgctcccagtcagaacctcttcaagctggccaacccgctggtggaccagtacttgtaccgcttcgtgagcacaaataacactggcggagtccagttcaacaagaacctggccgggagatacgccaacacctacaaaaactggttcccggggcccatgggccgaacccagggctggaacctgggctccggggtcaaccgcgccagtgtcagcgccttcgccacgaccaataggatggagctcgagggcgcgagttaccaggtgcccccgcagccgaacggcatgaccaacaacctccagggcagcaacacctatgccctggagaacactatgatcttcaacagccagccggcgaacccgggcaccaccgccacgtacctcgagggcaacatgctcatcaccagcgagagcgagacgcagccggtgaaccgcgtggcgtacaacgtcggcgggcagatggccaccaacaaccagagctccaccactgcccccgcgaccggcacgtacaacctccaggaaatcgtgcccggcagcgtgtggatggagagggacgtgtacctccaaggacccatctgggccaagatcccagagacgggggcgcactttcacccctctccggccatgggcggattcggactcaaacacccaccgcccatgatgctcatcaagaacacgcctgtgcccggaaatatcaccagcttctcggacgtgcccgtcagcagcttcatcacccagtacagcaccgggcaggtcaccgtggagatggagtgggagctcaagaaggaaaactccaagaggagaaacccagagatccagtacacaaacaactacaacgacccccagtttgtggactttgccccggacagcaccggggaatacagaaccaccagacctatcggaacccgataccttacccgacccctttaa

SEQ ID NO: 158 - protein, 724 aa, synthetic construct
MSFVDHPPDWLEEVGEGLREFLGLEAGPPKPKPNQQHQDQARGLVLPGYNYLGPGNGLDRGEPVNRADEVAREHDISYNEQLEAGDNPYLKYNHADAEFQEKLADDTSFGGNLGKAVFQAKKRVLEPFGLVEEGAKTAPTGKRIDDHFPKRKKARTEEDSKPSTSSDAEAGPSGSQQLQIPAQPASSLGADTMSAGGGGPLGDNNQGADGVGNASGDWHCDSTWMGDRVVTKSTRTWVLPSYNNHQYREIKSGSVDGSNANAYFGYSTPWGYFDFNRFHSHWSPRDWQRLINNYWGFRPRSLRVKIFNIQVKEVTVQDSTTTIANNLTSTVQVFTDDDYQLPYVVGNGTEGCLPAFPPQVFTLPQYGYATLNRDNTENPTERSSFFCLEYFPSKMLRTGNNFEFTYNFEEVPFHSSFAPSQNLFKLANPLVDQYLYRFVSTNNTGGVQFNKNLAGRYANTYKNWFPGPMGRTQGWNLGSGVNRASVSAFATTNRMELEGASYQVPPQPNGMTNNLQGSNTYALENTMIFNSQPANPGTTATYLEGNMLITSESETQPVNRVAYNVGGQMATNNQSSTTAPATGTYNLQEIVPGSVWMERDVYLQGPIWAKIPETGAHFHPSPAMGGFGLKHPPPMMLIKNTPVPGNITSFSDVPVSSFITQYSTGQVTVEMEWELKKENSKRRNPEIQYTNNYNDPQFVDFAPDSTGEYRTTRPIGTRYLTRPL

SEQ ID NO: 159 - DNA, 1767 bp, synthetic construct
  source 1..1767: mol_type = other DNA
acggcccctaccggaaagcggatagacgaccactttccaaaaagaaagaaggctcggaccgaagaggactccaagccttccacctcgtcagacgccgaagctggacccagcggatcccagcagctgcaaatcccagcccaaccagcctcaagtttgggagctgatacaatgtctgcgggaggtggcggcccattgggcgacaataaccaaggtgccgatggagtgggcaatgcctcgggagattggcattgcgattccacgtggatgggggacagagtcgtcaccaagtccacccgaacctgggtgctgcccagctacaacaaccaccagtaccgagagatcaaaagcggctccgtcgacggaagcaacgccaacgcctactttggatacagcaccccctgggggtactttgactttaaccgcttccacagccactggagcccccgagactggcaaagactcatcaacaactactggggcttcagaccccggtccctcagagtcaaaatcttcaacattcaagtcaaagaggtcacggtgcaggactccaccaccaccatcgccaacaacctcacctccaccgtccaagtgtttacggacgacgactaccagctgccctacgtcgtcggcaacgggaccgagggatgcctgccggccttccctccgcaggtctttacgctgccgcagtacggttacgcgacgctgaaccgcgacaacacagaaaatcccaccgagaggagcagcttcttctgcctagagtactttcccagcaagatgctgagaacgggcaacaactttgagtttacctacaactttgaggaggtgcccttccactccagcttcgctcccagtcagaacctcttcaagctggccaacccgctggtggaccagtacttgtaccgcttcgtgagcacaaataacactggcggagtccagttcaacaagaacctggccgggagatacgccaacacctacaaaaactggttcccggggcccatgggccgaacccagggctggaacctgggctccggggtcaaccgcgccagtgtcagcgccttcgccacgaccaataggatggagctcgagggcgcgagttaccaggtgcccccgcagccgaacggcatgaccaacaacctccagggcagcaacacctatgccctggagaacactatgatcttcaacagccagccggcgaacccgggcaccaccgccacgtacctcgagggcaacatgctcatcaccagcgagagcgagacgcagccggtgaaccgcgtggcgtacaacgtcggcgggcagatggccaccaacaaccagagctccaccactgcccccgcgaccggcacgtacaacctccaggaaatcgtgcccggcagcgtgtggatggagagggacgtgtacctccaaggacccatctgggccaagatcccagagacgggggcgcactttcacccctctccggccatgggcggattcggactcaaacacccaccgcccatgatgctcatcaagaacacgcctgtgcccggaaatatcaccagcttctcggacgtgcccgtcagcagcttcatcacccagtacagcaccgggcaggtcaccgtggagatggagtgggagctcaagaaggaaaactccaagaggagaaacccagagatccagtacacaaacaactacaacgacccccagtttgtggactttgccccggacagcaccggggaatacagaaccaccagacctatcggaacccgataccttacccgacccctttaa

SEQ ID NO: 160 - protein, 588 aa, synthetic construct
TAPTGKRIDDHFPKRKKARTEEDSKPSTSSDAEAGPSGSQQLQIPAQPASSLGADTMSAGGGGPLGDNNQGADGVGNASGDWHCDSTWMGDRVVTKSTRTWVLPSYNNHQYREIKSGSVDGSNANAYFGYSTPWGYFDFNRFHSHWSPRDWQRLINNYWGFRPRSLRVKIFNIQVKEVTVQDSTTTIANNLTSTVQVFTDDDYQLPYVVGNGTEGCLPAFPPQVFTLPQYGYATLNRDNTENPTERSSFFCLEYFPSKMLRTGNNFEFTYNFEEVPFHSSFAPSQNLFKLANPLVDQYLYRFVSTNNTGGVQFNKNLAGRYANTYKNWFPGPMGRTQGWNLGSGVNRASVSAFATTNRMELEGASYQVPPQPNGMTNNLQGSNTYALENTMIFNSQPANPGTTATYLEGNMLITSESETQPVNRVAYNVGGQMATNNQSSTTAPATGTYNLQEIVPGSVWMERDVYLQGPIWAKIPETGAHFHPSPAMGGFGLKHPPPMMLIKNTPVPGNITSFSDVPVSSFITQYSTGQVTVEMEWELKKENSKRRNPEIQYTNNYNDPQFVDFAPDSTGEYRTTRPIGTRYLTRPL

SEQ ID NO: 161 - DNA, 1599 bp, synthetic construct
  source 1..1599: mol_type = other DNA
atgtctgcgggaggtggcggcccattgggcgacaataaccaaggtgccgatggagtgggcaatgcctcgggagattggcattgcgattccacgtggatgggggacagagtcgtcaccaagtccacccgaacctgggtgctgcccagctacaacaaccaccagtaccgagagatcaaaagcggctccgtcgacggaagcaacgccaacgcctactttggatacagcaccccctgggggtactttgactttaaccgcttccacagccactggagcccccgagactggcaaagactcatcaacaactactggggcttcagaccccggtccctcagagtcaaaatcttcaacattcaagtcaaagaggtcacggtgcaggactccaccaccaccatcgccaacaacctcacctccaccgtccaagtgtttacggacgacgactaccagctgccctacgtcgtcggcaacgggaccgagggatgcctgccggccttccctccgcaggtctttacgctgccgcagtacggttacgcgacgctgaaccgcgacaacacagaaaatcccaccgagaggagcagcttcttctgcctagagtactttcccagcaagatgctgagaacgggcaacaactttgagtttacctacaactttgaggaggtgcccttccactccagcttcgctcccagtcagaacctcttcaagctggccaacccgctggtggaccagtacttgtaccgcttcgtgagcacaaataacactggcggagtccagttcaacaagaacctggccgggagatacgccaacacctacaaaaactggttcccggggcccatgggccgaacccagggctggaacctgggctccggggtcaaccgcgccagtgtcagcgccttcgccacgaccaataggatggagctcgagggcgcgagttaccaggtgcccccgcagccgaacggcatgaccaacaacctccagggcagcaacacctatgccctggagaacactatgatcttcaacagccagccggcgaacccgggcaccaccgccacgtacctcgagggcaacatgctcatcaccagcgagagcgagacgcagccggtgaaccgcgtggcgtacaacgtcggcgggcagatggccaccaacaaccagagctccaccactgcccccgcgaccggcacgtacaacctccaggaaatcgtgcccggcagcgtgtggatggagagggacgtgtacctccaaggacccatctgggccaagatcccagagacgggggcgcactttcacccctctccggccatgggcggattcggactcaaacacccaccgcccatgatgctcatcaagaacacgcctgtgcccggaaatatcaccagcttctcggacgtgcccgtcagcagcttcatcacccagtacagcaccgggcaggtcaccgtggagatggagtgggagctcaagaaggaaaactccaagaggagaaacccagagatccagtacacaaacaactacaacgacccccagtttgtggactttgccccggacagcaccggggaatacagaaccaccagacctatcggaacccgataccttacccgacccctttaa

SEQ ID NO: 162 - protein, 532 aa, synthetic construct
MSAGGGGPLGDNNQGADGVGNASGDWHCDSTWMGDRVVTKSTRTWVLPSYNNHQYREIKSGSVDGSNANAYFGYSTPWGYFDFNRFHSHWSPRDWQRLINNYWGFRPRSLRVKIFNIQVKEVTVQDSTTTIANNLTSTVQVFTDDDYQLPYVVGNGTEGCLPAFPPQVFTLPQYGYATLNRDNTENPTERSSFFCLEYFPSKMLRTGNNFEFTYNFEEVPFHSSFAPSQNLFKLANPLVDQYLYRFVSTNNTGGVQFNKNLAGRYANTYKNWFPGPMGRTQGWNLGSGVNRASVSAFATTNRMELEGASYQVPPQPNGMTNNLQGSNTYALENTMIFNSQPANPGTTATYLEGNMLITSESETQPVNRVAYNVGGQMATNNQSSTTAPATGTYNLQEIVPGSVWMERDVYLQGPIWAKIPETGAHFHPSPAMGGFGLKHPPPMMLIKNTPVPGNITSFSDVPVSSFITQYSTGQVTVEMEWELKKENSKRRNPEIQYTNNYNDPQFVDFAPDSTGEYRTTRPIGTRYLTRPL

SEQ ID NO: 163 - DNA, 2175 bp, synthetic construct
  source 1..2175: mol_type = other DNA
atggcttttgttgatcaccctccagattggttggaagaagttggtgaaggtcttcgcgagtttttgggccttgaagcgggcccaccgaaaccaaaacccaatcagcagcatcaagatcaagcccgtggtcttgtgctgcctggttataactatctcggacccggaaacggtctcgatcgaggagagcctgtcaacagggcagacgaggtcgcgcgagagcacgacatctcgtacaacgagcagcttgaggcgggagacaacccctacctcaagtacaaccacgcggacgccgagtttcaggagaagctcgccgacgacacatccttcgggggaaacctcggaaaggcagtctttcaggccaagaaaagggttctcgaaccttttggcctggttgaagagggtgctaagacggcccctaccggaaagcggatagacgaccactttccaaaaagaaagaaggctcggaccgaagaggactccaagccttccacctcgtcagacgccgaagctggacccagcggatcccagcagctgcaaatcccagcccaaccagcctcaagtttgggagctgatacaatgtctgcgggaggtggcggcccattgggcgacaataaccaaggtgccgatggagtgggcaatgcctcgggagattggcattgcgattccacgtggatgggggacagagtcgtcaccaagtccacccgaacctgggtgctgcccagctacaacaaccaccagtaccgagagatcaaaagcggctccgtcgacggaagcaacgccaacgcctactttggatacagcaccccctgggggtactttgactttaaccgcttccacagccactggagcccccgagactggcaaagactcatcaacaactactggggcttcagaccccggtccctcagagtcaaaatcttcaacattcaagtcaaagaggtcacggtgcaggactccaccaccaccatcgccaacaacctcacctccaccgtccaagtgtttacggacgacgactaccagctgccctacgtcgtcggcaacgggaccgagggatgcctgccggccttccctccgcaggtctttacgctgccgcagtacggttacgcgacgctgaaccgcgacaacacagaaaatcccaccgagaggagcagcttcttctgcctagagtactttcccagcaagatgctgagaacgggcaacaactttgagtttacctacaactttgaggaggtgcccttccactccagcttcgctcccagtcagaacctcttcaagctggccaacccgctggtggaccagtacttgtaccgcttcgtgagcacaaataacactggcggagtccagttcaacaagaacctggccgggagatacgccaacacctacaaaaactggttcccggggcccatgggccgaacccagggctggaacctgggctccggggtcaaccgcgccagtgtcagcgccttcgccacgaccaataggatggagctcgagggcgcgagttaccaggtgcccccgcagccgaacggcatgaccaacaacctccagggcagcaacacctatgccctggagaacactatgatcttcaacagccagccggcgaacccgggcaccaccgccacgtacctcgagggcaacatgctcatcaccagcgagagcgagacgcagccggtgaaccgcgtggcgtacaacgtcggcgggcagatggccaccaacaaccagagctccaccactgcccccgcgaccggcacgtacaacctccaggaaatcgtgcccggcagcgtgtggatggagagggacgtgtacctccaaggacccatctgggccaagatcccagagacgggggcgcactttcacccctctccggccatgggcggattcggactcaaacacccaccgcccatgatgctcatcaagaacacgcctgtgcccggaaatatcaccagcttctcggacgtgcccgtcagcagcttcatcacccagtacagcaccgggcaggtcaccgtggagatggagtgggagctcaagaaggaaaactccaagaggagaaacccagagatccagtacacaaacaactacaacgacccccagtttgtggactttgccccggacagcaccggggaatacagaagcaccagacctatcggaacccgataccttacccgacccctttaa

SEQ ID NO: 164 - protein, 724 aa, synthetic construct
MAFVDHPPDWLEEVGEGLREFLGLEAGPPKPKPNQQHQDQARGLVLPGYNYLGPGNGLDRGEPVNRADEVAREHDISYNEQLEAGDNPYLKYNHADAEFQEKLADDTSFGGNLGKAVFQAKKRVLEPFGLVEEGAKTAPTGKRIDDHFPKRKKARTEEDSKPSTSSDAEAGPSGSQQLQIPAQPASSLGADTMSAGGGGPLGDNNQGADGVGNASGDWHCDSTWMGDRVVTKSTRTWVLPSYNNHQYREIKSGSVDGSNANAYFGYSTPWGYFDFNRFHSHWSPRDWQRLINNYWGFRPRSLRVKIFNIQVKEVTVQDSTTTIANNLTSTVQVFTDDDYQLPYVVGNGTEGCLPAFPPQVFTLPQYGYATLNRDNTENPTERSSFFCLEYFPSKMLRTGNNFEFTYNFEEVPFHSSFAPSQNLFKLANPLVDQYLYRFVSTNNTGGVQFNKNLAGRYANTYKNWFPGPMGRTQGWNLGSGVNRASVSAFATTNRMELEGASYQVPPQPNGMTNNLQGSNTYALENTMIFNSQPANPGTTATYLEGNMLITSESETQPVNRVAYNVGGQMATNNQSSTTAPATGTYNLQEIVPGSVWMERDVYLQGPIWAKIPETGAHFHPSPAMGGFGLKHPPPMMLIKNTPVPGNITSFSDVPVSSFITQYSTGQVTVEMEWELKKENSKRRNPEIQYTNNYNDPQFVDFAPDSTGEYRSTRPIGTRYLTRPL

SEQ ID NO: 165 - DNA, 1767 bp, synthetic construct
  source 1..1767: mol_type = other DNA
acggcccctaccggaaagcggatagacgaccactttccaaaaagaaagaaggctcggaccgaagaggactccaagccttccacctcgtcagacgccgaagctggacccagcggatcccagcagctgcaaatcccagcccaaccagcctcaagtttgggagctgatacaatgtctgcgggaggtggcggcccattgggcgacaataaccaaggtgccgatggagtgggcaatgcctcgggagattggcattgcgattccacgtggatgggggacagagtcgtcaccaagtccacccgaacctgggtgctgcccagctacaacaaccaccagtaccgagagatcaaaagcggctccgtcgacggaagcaacgccaacgcctactttggatacagcaccccctgggggtactttgactttaaccgcttccacagccactggagcccccgagactggcaaagactcatcaacaactactggggcttcagaccccggtccctcagagtcaaaatcttcaacattcaagtcaaagaggtcacggtgcaggactccaccaccaccatcgccaacaacctcacctccaccgtccaagtgtttacggacgacgactaccagctgccctacgtcgtcggcaacgggaccgagggatgcctgccggccttccctccgcaggtctttacgctgccgcagtacggttacgcgacgctgaaccgcgacaacacagaaaatcccaccgagaggagcagcttcttctgcctagagtactttcccagcaagatgctgagaacgggcaacaactttgagtttacctacaactttgaggaggtgcccttccactccagcttcgctcccagtcagaacctcttcaagctggccaacccgctggtggaccagtacttgtaccgcttcgtgagcacaaataacactggcggagtccagttcaacaagaacctggccgggagatacgccaacacctacaaaaactggttcccggggcccatgggccgaacccagggctggaacctgggctccggggtcaaccgcgccagtgtcagcgccttcgccacgaccaataggatggagctcgagggcgcgagttaccaggtgcccccgcagccgaacggcatgaccaacaacctccagggcagcaacacctatgccctggagaacactatgatcttcaacagccagccggcgaacccgggcaccaccgccacgtacctcgagggcaacatgctcatcaccagcgagagcgagacgcagccggtgaaccgcgtggcgtacaacgtcggcgggcagatggccaccaacaaccagagctccaccactgcccccgcgaccggcacgtacaacctccaggaaatcgtgcccggcagcgtgtggatggagagggacgtgtacctccaaggacccatctgggccaagatcccagagacgggggcgcactttcacccctctccggccatgggcggattcggactcaaacacccaccgcccatgatgctcatcaagaacacgcctgtgcccggaaatatcaccagcttctcggacgtgcccgtcagcagcttcatcacccagtacagcaccgggcaggtcaccgtggagatggagtgggagctcaagaaggaaaactccaagaggagaaacccagagatccagtacacaaacaactacaacgacccccagtttgtggactttgccccggacagcaccggggaatacagaagcaccagacctatcggaacccgataccttacccgacccctttaa

SEQ ID NO: 166 - protein, 588 aa, synthetic construct
TAPTGKRIDDHFPKRKKARTEEDSKPSTSSDAEAGPSGSQQLQIPAQPASSLGADTMSAGGGGPLGDNNQGADGVGNASGDWHCDSTWMGDRVVTKSTRTWVLPSYNNHQYREIKSGSVDGSNANAYFGYSTPWGYFDFNRFHSHWSPRDWQRLINNYWGFRPRSLRVKIFNIQVKEVTVQDSTTTIANNLTSTVQVFTDDDYQLPYVVGNGTEGCLPAFPPQVFTLPQYGYATLNRDNTENPTERSSFFCLEYFPSKMLRTGNNFEFTYNFEEVPFHSSFAPSQNLFKLANPLVDQYLYRFVSTNNTGGVQFNKNLAGRYANTYKNWFPGPMGRTQGWNLGSGVNRASVSAFATTNRMELEGASYQVPPQPNGMTNNLQGSNTYALENTMIFNSQPANPGTTATYLEGNMLITSESETQPVNRVAYNVGGQMATNNQSSTTAPATGTYNLQEIVPGSVWMERDVYLQGPIWAKIPETGAHFHPSPAMGGFGLKHPPPMMLIKNTPVPGNITSFSDVPVSSFITQYSTGQVTVEMEWELKKENSKRRNPEIQYTNNYNDPQFVDFAPDSTGEYRSTRPIGTRYLTRPL

SEQ ID NO: 167 - DNA, 1599 bp, synthetic construct
  source 1..1599: mol_type = other DNA
atgtctgcgggaggtggcggcccattgggcgacaataaccaaggtgccgatggagtgggcaatgcctcgggagattggcattgcgattccacgtggatgggggacagagtcgtcaccaagtccacccgaacctgggtgctgcccagctacaacaaccaccagtaccgagagatcaaaagcggctccgtcgacggaagcaacgccaacgcctactttggatacagcaccccctgggggtactttgactttaaccgcttccacagccactggagcccccgagactggcaaagactcatcaacaactactggggcttcagaccccggtccctcagagtcaaaatcttcaacattcaagtcaaagaggtcacggtgcaggactccaccaccaccatcgccaacaacctcacctccaccgtccaagtgtttacggacgacgactaccagctgccctacgtcgtcggcaacgggaccgagggatgcctgccggccttccctccgcaggtctttacgctgccgcagtacggttacgcgacgctgaaccgcgacaacacagaaaatcccaccgagaggagcagcttcttctgcctagagtactttcccagcaagatgctgagaacgggcaacaactttgagtttacctacaactttgaggaggtgcccttccactccagcttcgctcccagtcagaacctcttcaagctggccaacccgctggtggaccagtacttgtaccgcttcgtgagcacaaataacactggcggagtccagttcaacaagaacctggccgggagatacgccaacacctacaaaaactggttcccggggcccatgggccgaacccagggctggaacctgggctccggggtcaaccgcgccagtgtcagcgccttcgccacgaccaataggatggagctcgagggcgcgagttaccaggtgcccccgcagccgaacggcatgaccaacaacctccagggcagcaacacctatgccctggagaacactatgatcttcaacagccagccggcgaacccgggcaccaccgccacgtacctcgagggcaacatgctcatcaccagcgagagcgagacgcagccggtgaaccgcgtggcgtacaacgtcggcgggcagatggccaccaacaaccagagctccaccactgcccccgcgaccggcacgtacaacctccaggaaatcgtgcccggcagcgtgtggatggagagggacgtgtacctccaaggacccatctgggccaagatcccagagacgggggcgcactttcacccctctccggccatgggcggattcggactcaaacacccaccgcccatgatgctcatcaagaacacgcctgtgcccggaaatatcaccagcttctcggacgtgcccgtcagcagcttcatcacccagtacagcaccgggcaggtcaccgtggagatggagtgggagctcaagaaggaaaactccaagaggagaaacccagagatccagtacacaaacaactacaacgacccccagtttgtggactttgccccggacagcaccggggaatacagaagcaccagacctatcggaacccgataccttacccgacccctttaa

SEQ ID NO: 168 - protein, 532 aa, synthetic construct
MSAGGGGPLGDNNQGADGVGNASGDWHCDSTWMGDRVVTKSTRTWVLPSYNNHQYREIKSGSVDGSNANAYFGYSTPWGYFDFNRFHSHWSPRDWQRLINNYWGFRPRSLRVKIFNIQVKEVTVQDSTTTIANNLTSTVQVFTDDDYQLPYVVGNGTEGCLPAFPPQVFTLPQYGYATLNRDNTENPTERSSFFCLEYFPSKMLRTGNNFEFTYNFEEVPFHSSFAPSQNLFKLANPLVDQYLYRFVSTNNTGGVQFNKNLAGRYANTYKNWFPGPMGRTQGWNLGSGVNRASVSAFATTNRMELEGASYQVPPQPNGMTNNLQGSNTYALENTMIFNSQPANPGTTATYLEGNMLITSESETQPVNRVAYNVGGQMATNNQSSTTAPATGTYNLQEIVPGSVWMERDVYLQGPIWAKIPETGAHFHPSPAMGGFGLKHPPPMMLIKNTPVPGNITSFSDVPVSSFITQYSTGQVTVEMEWELKKENSKRRNPEIQYTNNYNDPQFVDFAPDSTGEYRSTRPIGTRYLTRPL

SEQ ID NO: 169 - DNA, 2175 bp, synthetic construct
  source 1..2175: mol_type = other DNA
atgtcttttgttgatcaccctccagattggttggaagaagttggtgaaggtcttcgcgagtttttgggccttgaagcgggcccaccgaaaccaaaacccaatcagcagcatcaagatcaagcccgtggtcttgtgctgcctggttataactatctcggacccggaaacggtctcgatcgaggagagcctgtcaacagggcagacgaggtcgcgcgagagcacgacatctcgtacaacgagcagcttgaggcgggagacaacccctacctcaagtacaaccacgcggacgccgagtttcaggagaagctcgccgacgacacatccttcgggggaaacctcggaaaggcagtctttcaggccaagaaaagggttctcgaaccttttggcctggttgaagagggtgctaagacggcccctaccggaaagcggatagacgaccactttccaaaaagaaagaaggctcggaccgaagaggactccaagccttccacctcgtcagacgccgaagctggacccagcggatcccagcagctgcaaatcccagcccaaccagcctcaagtttgggagctgatacaatgtctgcgggaggtggcggcccattgggcgacaataaccaaggtgccgatggagtgggcaatgcctcgggagattggcattgcgatgccacgtggatgggggacagagtcgtcaccaagtccacccgaacctgggtgctgcccagctacaacaaccaccagtaccgagagatcaaaagcggctccgtcgacggaagcaacgccaacgcctactttggatacagcaccccctgggggtactttgactttaaccgcttccacagccactggagcccccgagactggcaaagactcatcaacaactactggggcttcagaccccggtccctcagagtcaaaatcttcaacattcaagtcaaagaggtcacggtgcaggactccaccaccaccatcgccaacaacctcacctccaccgtccaagtgtttacggacgacgactaccagctgccctacgtcgtcggcaacgggaccgagggatgcctgccggccttccctccgcaggtctttacgctgccgcagtacggttacgcgacgctgaaccgcgacaacacagaaaatcccaccgagaggagcagcttcttctgcctagagtactttcccagcaagatgctgagaacgggcaacaactttgagtttacctacaactttgaggaggtgcccttccactccagcttcgctcccagtcagaacctcttcaagctggccaacccgctggtggaccagtacttgtaccgcttcgtgagcacaaataacactggcggagtccagttcaacaagaacctggccgggagatacgccaacacctacaaaaactggttcccggggcccatgggccgaacccagggctggaacctgggctccggggtcaaccgcgccagtgtcagcgccttcgccacgaccaataggatggagctcgagggcgcgagttaccaggtgcccccgcagccgaacggcatgaccaacaacctccagggcagcaacacctatgccctggagaacactatgatcttcaacagccagccggcgaacccgggcaccaccgccacgtacctcgagggcaacatgctcatcaccagcgagagcgagacgcagccggtgaaccgcgtggcgtacaacgtcggcgggcagatggccaccaacaaccagagctccaccactgcccccgcgaccggcacgtacaacctccaggaaatcgtgcccggcagcgtgtggatggagagggacgtgtacctccaaggacccatctgggccaagatcccagagacgggggcgcactttcacccctctccggccatgggcggattcggactcaaacacccaccgcccatgatgctcatcaagaacacgcctgtgcccggaaatatcaccagcttctcggacgtgcccgtcagcagcttcatcacccagtacagcaccgggcaggtcaccgtggagatggagtgggagctcaagaaggaaaactccaagaggtggaacccagagatccagtacacaaacaactacaacgacccccagtttgtggactttgccccggacagcaccggggaatacagaaccaccagacctatcggaacccgataccttacccgacccctttaa

SEQ ID NO: 170 - protein, 724 aa, synthetic construct
MSFVDHPPDWLEEVGEGLREFLGLEAGPPKPKPNQQHQDQARGLVLPGYNYLGPGNGLDRGEPVNRADEVAREHDISYNEQLEAGDNPYLKYNHADAEFQEKLADDTSFGGNLGKAVFQAKKRVLEPFGLVEEGAKTAPTGKRIDDHFPKRKKARTEEDSKPSTSSDAEAGPSGSQQLQIPAQPASSLGADTMSAGGGGPLGDNNQGADGVGNASGDWHCDATWMGDRVVTKSTRTWVLPSYNNHQYREIKSGSVDGSNANAYFGYSTPWGYFDFNRFHSHWSPRDWQRLINNYWGFRPRSLRVKIFNIQVKEVTVQDSTTTIANNLTSTVQVFTDDDYQLPYVVGNGTEGCLPAFPPQVFTLPQYGYATLNRDNTENPTERSSFFCLEYFPSKMLRTGNNFEFTYNFEEVPFHSSFAPSQNLFKLANPLVDQYLYRFVSTNNTGGVQFNKNLAGRYANTYKNWFPGPMGRTQGWNLGSGVNRASVSAFATTNRMELEGASYQVPPQPNGMTNNLQGSNTYALENTMIFNSQPANPGTTATYLEGNMLITSESETQPVNRVAYNVGGQMATNNQSSTTAPATGTYNLQEIVPGSVWMERDVYLQGPIWAKIPETGAHFHPSPAMGGFGLKHPPPMMLIKNTPVPGNITSFSDVPVSSFITQYSTGQVTVEMEWELKKENSKRWNPEIQYTNNYNDPQFVDFAPDSTGEYRTTRPIGTRYLTRPL

SEQ ID NO: 171 - DNA, 1767 bp, synthetic construct
  source 1..1767: mol_type = other DNA
acggcccctaccggaaagcggatagacgaccactttccaaaaagaaagaaggctcggaccgaagaggactccaagccttccacctcgtcagacgccgaagctggacccagcggatcccagcagctgcaaatcccagcccaaccagcctcaagtttgggagctgatacaatgtctgcgggaggtggcggcccattgggcgacaataaccaaggtgccgatggagtgggcaatgcctcgggagattggcattgcgatgccacgtggatgggggacagagtcgtcaccaagtccacccgaacctgggtgctgcccagctacaacaaccaccagtaccgagagatcaaaagcggctccgtcgacggaagcaacgccaacgcctactttggatacagcaccccctgggggtactttgactttaaccgcttccacagccactggagcccccgagactggcaaagactcatcaacaactactggggcttcagaccccggtccctcagagtcaaaatcttcaacattcaagtcaaagaggtcacggtgcaggactccaccaccaccatcgccaacaacctcacctccaccgtccaagtgtttacggacgacgactaccagctgccctacgtcgtcggcaacgggaccgagggatgcctgccggccttccctccgcaggtctttacgctgccgcagtacggttacgcgacgctgaaccgcgacaacacagaaaatcccaccgagaggagcagcttcttctgcctagagtactttcccagcaagatgctgagaacgggcaacaactttgagtttacctacaactttgaggaggtgcccttccactccagcttcgctcccagtcagaacctcttcaagctggccaacccgctggtggaccagtacttgtaccgcttcgtgagcacaaataacactggcggagtccagttcaacaagaacctggccgggagatacgccaacacctacaaaaactggttcccggggcccatgggccgaacccagggctggaacctgggctccggggtcaaccgcgccagtgtcagcgccttcgccacgaccaataggatggagctcgagggcgcgagttaccaggtgcccccgcagccgaacggcatgaccaacaacctccagggcagcaacacctatgccctggagaacactatgatcttcaacagccagccggcgaacccgggcaccaccgccacgtacctcgagggcaacatgctcatcaccagcgagagcgagacgcagccggtgaaccgcgtggcgtacaacgtcggcgggcagatggccaccaacaaccagagctccaccactgcccccgcgaccggcacgtacaacctccaggaaatcgtgcccggcagcgtgtggatggagagggacgtgtacctccaaggacccatctgggccaagatcccagagacgggggcgcactttcacccctctccggccatgggcggattcggactcaaacacccaccgcccatgatgctcatcaagaacacgcctgtgcccggaaatatcaccagcttctcggacgtgcccgtcagcagcttcatcacccagtacagcaccgggcaggtcaccgtggagatggagtgggagctcaagaaggaaaactccaagaggtggaacccagagatccagtacacaaacaactacaacgacccccagtttgtggactttgccccggacagcaccggggaatacagaaccaccagacctatcggaacccgataccttacccgacccctttaa

SEQ ID NO: 172 - protein, 588 aa, synthetic construct
TAPTGKRIDDHFPKRKKARTEEDSKPSTSSDAEAGPSGSQQLQIPAQPASSLGADTMSAGGGGPLGDNNQGADGVGNASGDWHCDATWMGDRVVTKSTRTWVLPSYNNHQYREIKSGSVDGSNANAYFGYSTPWGYFDFNRFHSHWSPRDWQRLINNYWGFRPRSLRVKIFNIQVKEVTVQDSTTTIANNLTSTVQVFTDDDYQLPYVVGNGTEGCLPAFPPQVFTLPQYGYATLNRDNTENPTERSSFFCLEYFPSKMLRTGNNFEFTYNFEEVPFHSSFAPSQNLFKLANPLVDQYLYRFVSTNNTGGVQFNKNLAGRYANTYKNWFPGPMGRTQGWNLGSGVNRASVSAFATTNRMELEGASYQVPPQPNGMTNNLQGSNTYALENTMIFNSQPANPGTTATYLEGNMLITSESETQPVNRVAYNVGGQMATNNQSSTTAPATGTYNLQEIVPGSVWMERDVYLQGPIWAKIPETGAHFHPSPAMGGFGLKHPPPMMLIKNTPVPGNITSFSDVPVSSFITQYSTGQVTVEMEWELKKENSKRWNPEIQYTNNYNDPQFVDFAPDSTGEYRTTRPIGTRYLTRPL

SEQ ID NO: 173 - DNA, 1599 bp, synthetic construct
  source 1..1599: mol_type = other DNA
atgtctgcgggaggtggcggcccattgggcgacaataaccaaggtgccgatggagtgggcaatgcctcgggagattggcattgcgatgccacgtggatgggggacagagtcgtcaccaagtccacccgaacctgggtgctgcccagctacaacaaccaccagtaccgagagatcaaaagcggctccgtcgacggaagcaacgccaacgcctactttggatacagcaccccctgggggtactttgactttaaccgcttccacagccactggagcccccgagactggcaaagactcatcaacaactactggggcttcagaccccggtccctcagagtcaaaatcttcaacattcaagtcaaagaggtcacggtgcaggactccaccaccaccatcgccaacaacctcacctccaccgtccaagtgtttacggacgacgactaccagctgccctacgtcgtcggcaacgggaccgagggatgcctgccggccttccctccgcaggtctttacgctgccgcagtacggttacgcgacgctgaaccgcgacaacacagaaaatcccaccgagaggagcagcttcttctgcctagagtactttcccagcaagatgctgagaacgggcaacaactttgagtttacctacaactttgaggaggtgcccttccactccagcttcgctcccagtcagaacctcttcaagctggccaacccgctggtggaccagtacttgtaccgcttcgtgagcacaaataacactggcggagtccagttcaacaagaacctggccgggagatacgccaacacctacaaaaactggttcccggggcccatgggccgaacccagggctggaacctgggctccggggtcaaccgcgccagtgtcagcgccttcgccacgaccaataggatggagctcgagggcgcgagttaccaggtgcccccgcagccgaacggcatgaccaacaacctccagggcagcaacacctatgccctggagaacactatgatcttcaacagccagccggcgaacccgggcaccaccgccacgtacctcgagggcaacatgctcatcaccagcgagagcgagacgcagccggtgaaccgcgtggcgtacaacgtcggcgggcagatggccaccaacaaccagagctccaccactgcccccgcgaccggcacgtacaacctccaggaaatcgtgcccggcagcgtgtggatggagagggacgtgtacctccaaggacccatctgggccaagatcccagagacgggggcgcactttcacccctctccggccatgggcggattcggactcaaacacccaccgcccatgatgctcatcaagaacacgcctgtgcccggaaatatcaccagcttctcggacgtgcccgtcagcagcttcatcacccagtacagcaccgggcaggtcaccgtggagatggagtgggagctcaagaaggaaaactccaagaggtggaacccagagatccagtacacaaacaactacaacgacccccagtttgtggactttgccccggacagcaccggggaatacagaaccaccagacctatcggaacccgataccttacccgacccctttaa

SEQ ID NO: 174 - protein, 532 aa, synthetic construct
MSAGGGGPLGDNNQGADGVGNASGDWHCDATWMGDRVVTKSTRTWVLPSYNNHQYREIKSGSVDGSNANAYFGYSTPWGYFDFNRFHSHWSPRDWQRLINNYWGFRPRSLRVKIFNIQVKEVTVQDSTTTIANNLTSTVQVFTDDDYQLPYVVGNGTEGCLPAFPPQVFTLPQYGYATLNRDNTENPTERSSFFCLEYFPSKMLRTGNNFEFTYNFEEVPFHSSFAPSQNLFKLANPLVDQYLYRFVSTNNTGGVQFNKNLAGRYANTYKNWFPGPMGRTQGWNLGSGVNRASVSAFATTNRMELEGASYQVPPQPNGMTNNLQGSNTYALENTMIFNSQPANPGTTATYLEGNMLITSESETQPVNRVAYNVGGQMATNNQSSTTAPATGTYNLQEIVPGSVWMERDVYLQGPIWAKIPETGAHFHPSPAMGGFGLKHPPPMMLIKNTPVPGNITSFSDVPVSSFITQYSTGQVTVEMEWELKKENSKRWNPEIQYTNNYNDPQFVDFAPDSTGEYRTTRPIGTRYLTRPL

SEQ ID NO: 175 - DNA, 2175 bp, synthetic construct
  source 1..2175: mol_type = other DNA
atggcttttgttgatcaccctccagattggttggaagaagttggtgaaggtcttcgcgagtttttgggccttgaagcgggcccaccgaaaccaaaacccaatcagcagcatcaagatcaagcccgtggtcttgtgctgcctggttataactatctcggacccggaaacggtctcgatcgaggagagcctgtcaacagggcagacgaggtcgcgcgagagcacgacatctcgtacaacgagcagcttgaggcgggagacaacccctacctcaagtacaaccacgcggacgccgagtttcaggagaagctcgccgacgacacatccttcgggggaaacctcggaaaggcagtctttcaggccaagaaaagggttctcgaaccttttggcctggttgaagagggtgctaagacggcccctaccggaaagcggatagacgaccactttccaaaaagaaagaaggctcggaccgaagaggactccaagccttccacctcgtcagacgccgaagctggacccagcggatcccagcagctgcaaatcccagcccaaccagcctcaagtttgggagctgatacaatgtctgcgggaggtggcggcccattgggcgacaataaccaaggtgccgatggagtgggcaatgcctcgggagattggcattgcgatgccacgtggatgggggacagagtcgtcaccaagtccacccgaacctgggtgctgcccagctacaacaaccaccagtaccgagagatcaaaagcggctccgtcgacggaagcaacgccaacgcctactttggatacagcaccccctgggggtactttgactttaaccgcttccacagccactggagcccccgagactggcaaagactcatcaacaactactggggcttcagaccccggtccctcagagtcaaaatcttcaacattcaagtcaaagaggtcacggtgcaggactccaccaccaccatcgccaacaacctcacctccaccgtccaagtgtttacggacgacgactaccagctgccctacgtcgtcggcaacgggaccgagggatgcctgccggccttccctccgcaggtctttacgctgccgcagtacggttacgcgacgctgaaccgcgacaacacagaaaatcccaccgagaggagcagcttcttctgcctagagtactttcccagcaagatgctgagaacgggcaacaactttgagtttacctacaactttgaggaggtgcccttccactccagcttcgctcccagtcagaacctcttcaagctggccaacccgctggtggaccagtacttgtaccgcttcgtgagcacaaataacactggcggagtccagttcaacaagaacctggccgggagatacgccaacacctacaaaaactggttcccggggcccatgggccgaacccagggctggaacctgggctccggggtcaaccgcgccagtgtcagcgccttcgccacgaccaataggatggagctcgagggcgcgagttaccaggtgcccccgcagccgaacggcatgaccaacaacctccagggcagcaacacctatgccctggagaacactatgatcttcaacagccagccggcgaacccgggcaccaccgccacgtacctcgagggcaacatgctcatcaccagcgagagcgagacgcagccggtgaaccgcgtggcgtacaacgtcggcgggcagatggccaccaacaaccagagctccaccactgcccccgcgaccggcacgtacaacctccaggaaatcgtgcccggcagcgtgtggatggagagggacgtgtacctccaaggacccatctgggccaagatcccagagacgggggcgcactttcacccctctccggccatgggcggattcggactcaaacacccaccgcccatgatgctcatcaagaacacgcctgtgcccggaaatatcaccagcttctcggacgtgcccgtcagcagcttcatcacccagtacagcaccgggcaggtcaccgtggagatggagtgggagctcaagaaggaaaactccaagaggtggaacccagagatccagtacacaaacaactacaacgacccccagtttgtggactttgccccggacagcaccggggaatacagaagcaccagacctatcggaacccgataccttacccgacccctttaa

SEQ ID NO: 176 - protein, 724 aa, synthetic construct
MAFVDHPPDWLEEVGEGLREFLGLEAGPPKPKPNQQHQDQARGLVLPGYNYLGPGNGLDRGEPVNRADEVAREHDISYNEQLEAGDNPYLKYNHADAEFQEKLADDTSFGGNLGKAVFQAKKRVLEPFGLVEEGAKTAPTGKRIDDHFPKRKKARTEEDSKPSTSSDAEAGPSGSQQLQIPAQPASSLGADTMSAGGGGPLGDNNQGADGVGNASGDWHCDATWMGDRVVTKSTRTWVLPSYNNHQYREIKSGSVDGSNANAYFGYSTPWGYFDFNRFHSHWSPRDWQRLINNYWGFRPRSLRVKIFNIQVKEVTVQDSTTTIANNLTSTVQVFTDDDYQLPYVVGNGTEGCLPAFPPQVFTLPQYGYATLNRDNTENPTERSSFFCLEYFPSKMLRTGNNFEFTYNFEEVPFHSSFAPSQNLFKLANPLVDQYLYRFVSTNNTGGVQFNKNLAGRYANTYKNWFPGPMGRTQGWNLGSGVNRASVSAFATTNRMELEGASYQVPPQPNGMTNNLQGSNTYALENTMIFNSQPANPGTTATYLEGNMLITSESETQPVNRVAYNVGGQMATNNQSSTTAPATGTYNLQEIVPGSVWMERDVYLQGPIWAKIPETGAHFHPSPAMGGFGLKHPPPMMLIKNTPVPGNITSFSDVPVSSFITQYSTGQVTVEMEWELKKENSKRWNPEIQYTNNYNDPQFVDFAPDSTGEYRSTRPIGTRYLTRPL

SEQ ID NO: 177 - DNA, 1767 bp, synthetic construct
  source 1..1767: mol_type = other DNA
acggcccctaccggaaagcggatagacgaccactttccaaaaagaaagaaggctcggaccgaagaggactccaagccttccacctcgtcagacgccgaagctggacccagcggatcccagcagctgcaaatcccagcccaaccagcctcaagtttgggagctgatacaatgtctgcgggaggtggcggcccattgggcgacaataaccaaggtgccgatggagtgggcaatgcctcgggagattggcattgcgatgccacgtggatgggggacagagtcgtcaccaagtccacccgaacctgggtgctgcccagctacaacaaccaccagtaccgagagatcaaaagcggctccgtcgacggaagcaacgccaacgcctactttggatacagcaccccctgggggtactttgactttaaccgcttccacagccactggagcccccgagactggcaaagactcatcaacaactactggggcttcagaccccggtccctcagagtcaaaatcttcaacattcaagtcaaagaggtcacggtgcaggactccaccaccaccatcgccaacaacctcacctccaccgtccaagtgtttacggacgacgactaccagctgccctacgtcgtcggcaacgggaccgagggatgcctgccggccttccctccgcaggtctttacgctgccgcagtacggttacgcgacgctgaaccgcgacaacacagaaaatcccaccgagaggagcagcttcttctgcctagagtactttcccagcaagatgctgagaacgggcaacaactttgagtttacctacaactttgaggaggtgcccttccactccagcttcgctcccagtcagaacctcttcaagctggccaacccgctggtggaccagtacttgtaccgcttcgtgagcacaaataacactggcggagtccagttcaacaagaacctggccgggagatacgccaacacctacaaaaactggttcccggggcccatgggccgaacccagggctggaacctgggctccggggtcaaccgcgccagtgtcagcgccttcgccacgaccaataggatggagctcgagggcgcgagttaccaggtgcccccgcagccgaacggcatgaccaacaacctccagggcagcaacacctatgccctggagaacactatgatcttcaacagccagccggcgaacccgggcaccaccgccacgtacctcgagggcaacatgctcatcaccagcgagagcgagacgcagccggtgaaccgcgtggcgtacaacgtcggcgggcagatggccaccaacaaccagagctccaccactgcccccgcgaccggcacgtacaacctccaggaaatcgtgcccggcagcgtgtggatggagagggacgtgtacctccaaggacccatctgggccaagatcccagagacgggggcgcactttcacccctctccggccatgggcggattcggactcaaacacccaccgcccatgatgctcatcaagaacacgcctgtgcccggaaatatcaccagcttctcggacgtgcccgtcagcagcttcatcacccagtacagcaccgggcaggtcaccgtggagatggagtgggagctcaagaaggaaaactccaagaggtggaacccagagatccagtacacaaacaactacaacgacccccagtttgtggactttgccccggacagcaccggggaatacagaagcaccagacctatcggaacccgataccttacccgacccctttaa

SEQ ID NO: 178 - protein, 588 aa, synthetic construct
TAPTGKRIDDHFPKRKKARTEEDSKPSTSSDAEAGPSGSQQLQIPAQPASSLGADTMSAGGGGPLGDNNQGADGVGNASGDWHCDATWMGDRVVTKSTRTWVLPSYNNHQYREIKSGSVDGSNANAYFGYSTPWGYFDFNRFHSHWSPRDWQRLINNYWGFRPRSLRVKIFNIQVKEVTVQDSTTTIANNLTSTVQVFTDDDYQLPYVVGNGTEGCLPAFPPQVFTLPQYGYATLNRDNTENPTERSSFFCLEYFPSKMLRTGNNFEFTYNFEEVPFHSSFAPSQNLFKLANPLVDQYLYRFVSTNNTGGVQFNKNLAGRYANTYKNWFPGPMGRTQGWNLGSGVNRASVSAFATTNRMELEGASYQVPPQPNGMTNNLQGSNTYALENTMIFNSQPANPGTTATYLEGNMLITSESETQPVNRVAYNVGGQMATNNQSSTTAPATGTYNLQEIVPGSVWMERDVYLQGPIWAKIPETGAHFHPSPAMGGFGLKHPPPMMLIKNTPVPGNITSFSDVPVSSFITQYSTGQVTVEMEWELKKENSKRWNPEIQYTNNYNDPQFVDFAPDSTGEYRSTRPIGTRYLTRPL

SEQ ID NO: 179 - DNA, 1599 bp, synthetic construct
  source 1..1599: mol_type = other DNA
atgtctgcgggaggtggcggcccattgggcgacaataaccaaggtgccgatggagtgggcaatgcctcgggagattggcattgcgatgccacgtggatgggggacagagtcgtcaccaagtccacccgaacctgggtgctgcccagctacaacaaccaccagtaccgagagatcaaaagcggctccgtcgacggaagcaacgccaacgcctactttggatacagcaccccctgggggtactttgactttaaccgcttccacagccactggagcccccgagactggcaaagactcatcaacaactactggggcttcagaccccggtccctcagagtcaaaatcttcaacattcaagtcaaagaggtcacggtgcaggactccaccaccaccatcgccaacaacctcacctccaccgtccaagtgtttacggacgacgactaccagctgccctacgtcgtcggcaacgggaccgagggatgcctgccggccttccctccgcaggtctttacgctgccgcagtacggttacgcgacgctgaaccgcgacaacacagaaaatcccaccgagaggagcagcttcttctgcctagagtactttcccagcaagatgctgagaacgggcaacaactttgagtttacctacaactttgaggaggtgcccttccactccagcttcgctcccagtcagaacctcttcaagctggccaacccgctggtggaccagtacttgtaccgcttcgtgagcacaaataacactggcggagtccagttcaacaagaacctggccgggagatacgccaacacctacaaaaactggttcccggggcccatgggccgaacccagggctggaacctgggctccggggtcaaccgcgccagtgtcagcgccttcgccacgaccaataggatggagctcgagggcgcgagttaccaggtgcccccgcagccgaacggcatgaccaacaacctccagggcagcaacacctatgccctggagaacactatgatcttcaacagccagccggcgaacccgggcaccaccgccacgtacctcgagggcaacatgctcatcaccagcgagagcgagacgcagccggtgaaccgcgtggcgtacaacgtcggcgggcagatggccaccaacaaccagagctccaccactgcccccgcgaccggcacgtacaacctccaggaaatcgtgcccggcagcgtgtggatggagagggacgtgtacctccaaggacccatctgggccaagatcccagagacgggggcgcactttcacccctctccggccatgggcggattcggactcaaacacccaccgcccatgatgctcatcaagaacacgcctgtgcccggaaatatcaccagcttctcggacgtgcccgtcagcagcttcatcacccagtacagcaccgggcaggtcaccgtggagatggagtgggagctcaagaaggaaaactccaagaggtggaacccagagatccagtacacaaacaactacaacgacccccagtttgtggactttgccccggacagcaccggggaatacagaagcaccagacctatcggaacccgataccttacccgacccctttaa

SEQ ID NO: 180 - protein, 532 aa, synthetic construct
MSAGGGGPLGDNNQGADGVGNASGDWHCDATWMGDRVVTKSTRTWVLPSYNNHQYREIKSGSVDGSNANAYFGYSTPWGYFDFNRFHSHWSPRDWQRLINNYWGFRPRSLRVKIFNIQVKEVTVQDSTTTIANNLTSTVQVFTDDDYQLPYVVGNGTEGCLPAFPPQVFTLPQYGYATLNRDNTENPTERSSFFCLEYFPSKMLRTGNNFEFTYNFEEVPFHSSFAPSQNLFKLANPLVDQYLYRFVSTNNTGGVQFNKNLAGRYANTYKNWFPGPMGRTQGWNLGSGVNRASVSAFATTNRMELEGASYQVPPQPNGMTNNLQGSNTYALENTMIFNSQPANPGTTATYLEGNMLITSESETQPVNRVAYNVGGQMATNNQSSTTAPATGTYNLQEIVPGSVWMERDVYLQGPIWAKIPETGAHFHPSPAMGGFGLKHPPPMMLIKNTPVPGNITSFSDVPVSSFITQYSTGQVTVEMEWELKKENSKRWNPEIQYTNNYNDPQFVDFAPDSTGEYRSTRPIGTRYLTRPL

SEQ ID NO: 181 - DNA, 2175 bp, synthetic construct
  source 1..2175: mol_type = other DNA
atgtcttttgttgatcaccctccagattggttggaagaagttggtgaaggtcttcgcgagtttttgggccttgaagcgggcccaccgaaaccaaaacccaatcagcagcatcaagatcaagcccgtggtcttgtgctgcctggttataactatctcggacccggaaacggtctcgatcgaggagagcctgtcaacagggcagacgaggtcgcgcgagagcacgacatctcgtacaacgagcagcttgaggcgggagacaacccctacctcaagtacaaccacgcggacgccgagtttcaggagaagctcgccgacgacacatccttcgggggaaacctcggaaaggcagtctttcaggccaagaaaagggttctcgaaccttttggcctggttgaagagggtgctaagacggcccctaccggaaagcggatagacgaccactttccaaaaagaaagaaggctcggaccgaagaggactccaagccttccacctcgtcagacgccgaagctggacccagcggatcccagcagctgcaaatcccagcccaaccagcctcaagtttgggagctgatacaatgtctgcgggaggtggcggcccattgggcgacaataaccaaggtgccgatggagtgggcaatgcctcgggagattggcattgcgattccacgtggatgggggacagagtcgtcaccaagtccacccgaacctgggtgctgcccagctacaacaaccaccagtaccgagagatcaaaagcggctccgtcgacggaagcaacgccaacgcctactttggatacagcaccccctgggggtactttgactttaaccgcttccacagccactggagccccctggactggcaaagactcatcaacaactactggggcttcagaccccggtccctcagagtcaaaatcttcaacattcaagtcaaagaggtcacggtgcaggactccaccaccaccatcgccaacaacctcacctccaccgtccaagtgtttacggacgacgactaccagctgccctacgtcgtcggcaacgggaccgagggatgcctgccggccttccctccgcaggtctttacgctgccgcagtacggttacgcgacgctgaaccgcgacaacacagaaaatcccaccgagaggagcagcttcttctgcctagagtactttcccagcaagatgctgagaacgggcaacaactttgagtttacctacaactttgaggaggtgcccttccactccagcttcgctcccagtcagaacctcttcaagctggccaacccgctggtggaccagtacttgtaccgcttcgtgagcacaaataacactggcggagtccagttcaacaagaacctggccgggagatacgccaacacctacaaaaactggttcccggggcccatgggccgaacccagggctggaacctgggctccggggtcaaccgcgccagtgtcagcgccttcgccacgaccaataggatggagctcgagggcgcgagttaccaggtgcccccgcagccgaacggcatgaccaacaacctccagggcagcaacacctatgccctggagaacactatgatcttcaacagccagccggcgaacccgggcaccaccgccacgtacctcgagggcaacatgctcatcaccagcgagagcgagacgcagccggtgaaccgcgtggcgtacaacgtcggcgggcagatggccaccaacaaccagagctccaccactgcccccgcgaccggcacgtacaacctccaggaaatcgtgcccggcagcgtgtggatggagagggacgtgtacctccaaggacccatctgggccaagatcccagagacgggggcgcactttcacccctctccggccatgggcggattcggactcaaacacccaccgcccatgatgctcatcaagaacacgcctgtgcccggaaatatcaccagcttctcggacgtgcccgtcagcagcttcatcacccagtacagcaccgggcaggtcaccgtggagatggagtgggagctcaagaaggaaaactccaagaggtggaacccagagatccagtacacaaacaactacaacgacccccagtttgtggactttgccccggacagcaccggggaatacagaaccaccagacctatcggaacccgataccttacccgacccctttaa

SEQ ID NO: 182 - protein, 724 aa, synthetic construct
MSFVDHPPDWLEEVGEGLREFLGLEAGPPKPKPNQQHQDQARGLVLPGYNYLGPGNGLDRGEPVNRADEVAREHDISYNEQLEAGDNPYLKYNHADAEFQEKLADDTSFGGNLGKAVFQAKKRVLEPFGLVEEGAKTAPTGKRIDDHFPKRKKARTEEDSKPSTSSDAEAGPSGSQQLQIPAQPASSLGADTMSAGGGGPLGDNNQGADGVGNASGDWHCDSTWMGDRVVTKSTRTWVLPSYNNHQYREIKSGSVDGSNANAYFGYSTPWGYFDFNRFHSHWSPLDWQRLINNYWGFRPRSLRVKIFNIQVKEVTVQDSTTTIANNLTSTVQVFTDDDYQLPYVVGNGTEGCLPAFPPQVFTLPQYGYATLNRDNTENPTERSSFFCLEYFPSKMLRTGNNFEFTYNFEEVPFHSSFAPSQNLFKLANPLVDQYLYRFVSTNNTGGVQFNKNLAGRYANTYKNWFPGPMGRTQGWNLGSGVNRASVSAFATTNRMELEGASYQVPPQPNGMTNNLQGSNTYALENTMIFNSQPANPGTTATYLEGNMLITSESETQPVNRVAYNVGGQMATNNQSSTTAPATGTYNLQEIVPGSVWMERDVYLQGPIWAKIPETGAHFHPSPAMGGFGLKHPPPMMLIKNTPVPGNITSFSDVPVSSFITQYSTGQVTVEMEWELKKENSKRWNPEIQYTNNYNDPQFVDFAPDSTGEYRTTRPIGTRYLTRPL

SEQ ID NO: 183 - DNA, 1767 bp, synthetic construct
  source 1..1767: mol_type = other DNA
acggcccctaccggaaagcggatagacgaccactttccaaaaagaaagaaggctcggaccgaagaggactccaagccttccacctcgtcagacgccgaagctggacccagcggatcccagcagctgcaaatcccagcccaaccagcctcaagtttgggagctgatacaatgtctgcgggaggtggcggcccattgggcgacaataaccaaggtgccgatggagtgggcaatgcctcgggagattggcattgcgattccacgtggatgggggacagagtcgtcaccaagtccacccgaacctgggtgctgcccagctacaacaaccaccagtaccgagagatcaaaagcggctccgtcgacggaagcaacgccaacgcctactttggatacagcaccccctgggggtactttgactttaaccgcttccacagccactggagccccctggactggcaaagactcatcaacaactactggggcttcagaccccggtccctcagagtcaaaatcttcaacattcaagtcaaagaggtcacggtgcaggactccaccaccaccatcgccaacaacctcacctccaccgtccaagtgtttacggacgacgactaccagctgccctacgtcgtcggcaacgggaccgagggatgcctgccggccttccctccgcaggtctttacgctgccgcagtacggttacgcgacgctgaaccgcgacaacacagaaaatcccaccgagaggagcagcttcttctgcctagagtactttcccagcaagatgctgagaacgggcaacaactttgagtttacctacaactttgaggaggtgcccttccactccagcttcgctcccagtcagaacctcttcaagctggccaacccgctggtggaccagtacttgtaccgcttcgtgagcacaaataacactggcggagtccagttcaacaagaacctggccgggagatacgccaacacctacaaaaactggttcccggggcccatgggccgaacccagggctggaacctgggctccggggtcaaccgcgccagtgtcagcgccttcgccacgaccaataggatggagctcgagggcgcgagttaccaggtgcccccgcagccgaacggcatgaccaacaacctccagggcagcaacacctatgccctggagaacactatgatcttcaacagccagccggcgaacccgggcaccaccgccacgtacctcgagggcaacatgctcatcaccagcgagagcgagacgcagccggtgaaccgcgtggcgtacaacgtcggcgggcagatggccaccaacaaccagagctccaccactgcccccgcgaccggcacgtacaacctccaggaaatcgtgcccggcagcgtgtggatggagagggacgtgtacctccaaggacccatctgggccaagatcccagagacgggggcgcactttcacccctctccggccatgggcggattcggactcaaacacccaccgcccatgatgctcatcaagaacacgcctgtgcccggaaatatcaccagcttctcggacgtgcccgtcagcagcttcatcacccagtacagcaccgggcaggtcaccgtggagatggagtgggagctcaagaaggaaaactccaagaggtggaacccagagatccagtacacaaacaactacaacgacccccagtttgtggactttgccccggacagcaccggggaatacagaaccaccagacctatcggaacccgataccttacccgacccctttaa

SEQ ID NO: 184 - protein, 588 aa, synthetic construct
TAPTGKRIDDHFPKRKKARTEEDSKPSTSSDAEAGPSGSQQLQIPAQPASSLGADTMSAGGGGPLGDNNQGADGVGNASGDWHCDSTWMGDRVVTKSTRTWVLPSYNNHQYREIKSGSVDGSNANAYFGYSTPWGYFDFNRFHSHWSPLDWQRLINNYWGFRPRSLRVKIFNIQVKEVTVQDSTTTIANNLTSTVQVFTDDDYQLPYVVGNGTEGCLPAFPPQVFTLPQYGYATLNRDNTENPTERSSFFCLEYFPSKMLRTGNNFEFTYNFEEVPFHSSFAPSQNLFKLANPLVDQYLYRFVSTNNTGGVQFNKNLAGRYANTYKNWFPGPMGRTQGWNLGSGVNRASVSAFATTNRMELEGASYQVPPQPNGMTNNLQGSNTYALENTMIFNSQPANPGTTATYLEGNMLITSESETQPVNRVAYNVGGQMATNNQSSTTAPATGTYNLQEIVPGSVWMERDVYLQGPIWAKIPETGAHFHPSPAMGGFGLKHPPPMMLIKNTPVPGNITSFSDVPVSSFITQYSTGQVTVEMEWELKKENSKRWNPEIQYTNNYNDPQFVDFAPDSTGEYRTTRPIGTRYLTRPL

SEQ ID NO: 185 - DNA, 1599 bp, synthetic construct
  source 1..1599: mol_type = other DNA
atgtctgcgggaggtggcggcccattgggcgacaataaccaaggtgccgatggagtgggcaatgcctcgggagattggcattgcgattccacgtggatgggggacagagtcgtcaccaagtccacccgaacctgggtgctgcccagctacaacaaccaccagtaccgagagatcaaaagcggctccgtcgacggaagcaacgccaacgcctactttggatacagcaccccctgggggtactttgactttaaccgcttccacagccactggagccccctggactggcaaagactcatcaacaactactggggcttcagaccccggtccctcagagtcaaaatcttcaacattcaagtcaaagaggtcacggtgcaggactccaccaccaccatcgccaacaacctcacctccaccgtccaagtgtttacggacgacgactaccagctgccctacgtcgtcggcaacgggaccgagggatgcctgccggccttccctccgcaggtctttacgctgccgcagtacggttacgcgacgctgaaccgcgacaacacagaaaatcccaccgagaggagcagcttcttctgcctagagtactttcccagcaagatgctgagaacgggcaacaactttgagtttacctacaactttgaggaggtgcccttccactccagcttcgctcccagtcagaacctcttcaagctggccaacccgctggtggaccagtacttgtaccgcttcgtgagcacaaataacactggcggagtccagttcaacaagaacctggccgggagatacgccaacacctacaaaaactggttcccggggcccatgggccgaacccagggctggaacctgggctccggggtcaaccgcgccagtgtcagcgccttcgccacgaccaataggatggagctcgagggcgcgagttaccaggtgcccccgcagccgaacggcatgaccaacaacctccagggcagcaacacctatgccctggagaacactatgatcttcaacagccagccggcgaacccgggcaccaccgccacgtacctcgagggcaacatgctcatcaccagcgagagcgagacgcagccggtgaaccgcgtggcgtacaacgtcggcgggcagatggccaccaacaaccagagctccaccactgcccccgcgaccggcacgtacaacctccaggaaatcgtgcccggcagcgtgtggatggagagggacgtgtacctccaaggacccatctgggccaagatcccagagacgggggcgcactttcacccctctccggccatgggcggattcggactcaaacacccaccgcccatgatgctcatcaagaacacgcctgtgcccggaaatatcaccagcttctcggacgtgcccgtcagcagcttcatcacccagtacagcaccgggcaggtcaccgtggagatggagtgggagctcaagaaggaaaactccaagaggtggaacccagagatccagtacacaaacaactacaacgacccccagtttgtggactttgccccggacagcaccggggaatacagaaccaccagacctatcggaacccgataccttacccgacccctttaa

SEQ ID NO: 186 - protein, 532 aa, synthetic construct
MSAGGGGPLGDNNQGADGVGNASGDWHCDSTWMGDRVVTKSTRTWVLPSYNNHQYREIKSGSVDGSNANAYFGYSTPWGYFDFNRFHSHWSPLDWQRLINNYWGFRPRSLRVKIFNIQVKEVTVQDSTTTIANNLTSTVQVFTDDDYQLPYVVGNGTEGCLPAFPPQVFTLPQYGYATLNRDNTENPTERSSFFCLEYFPSKMLRTGNNFEFTYNFEEVPFHSSFAPSQNLFKLANPLVDQYLYRFVSTNNTGGVQFNKNLAGRYANTYKNWFPGPMGRTQGWNLGSGVNRASVSAFATTNRMELEGASYQVPPQPNGMTNNLQGSNTYALENTMIFNSQPANPGTTATYLEGNMLITSESETQPVNRVAYNVGGQMATNNQSSTTAPATGTYNLQEIVPGSVWMERDVYLQGPIWAKIPETGAHFHPSPAMGGFGLKHPPPMMLIKNTPVPGNITSFSDVPVSSFITQYSTGQVTVEMEWELKKENSKRWNPEIQYTNNYNDPQFVDFAPDSTGEYRTTRPIGTRYLTRPL

SEQ ID NO: 187 - DNA, 2175 bp, synthetic construct
  source 1..2175: mol_type = other DNA
atggcttttgttgatcaccctccagattggttggaagaagttggtgaaggtcttcgcgagtttttgggccttgaagcgggcccaccgaaaccaaaacccaatcagcagcatcaagatcaagcccgtggtcttgtgctgcctggttataactatctcggacccggaaacggtctcgatcgaggagagcctgtcaacagggcagacgaggtcgcgcgagagcacgacatctcgtacaacgagcagcttgaggcgggagacaacccctacctcaagtacaaccacgcggacgccgagtttcaggagaagctcgccgacgacacatccttcgggggaaacctcggaaaggcagtctttcaggccaagaaaagggttctcgaaccttttggcctggttgaagagggtgctaagacggcccctaccggaaagcggatagacgaccactttccaaaaagaaagaaggctcggaccgaagaggactccaagccttccacctcgtcagacgccgaagctggacccagcggatcccagcagctgcaaatcccagcccaaccagcctcaagtttgggagctgatacaatgtctgcgggaggtggcggcccattgggcgacaataaccaaggtgccgatggagtgggcaatgcctcgggagattggcattgcgattccacgtggatgggggacagagtcgtcaccaagtccacccgaacctgggtgctgcccagctacaacaaccaccagtaccgagagatcaaaagcggctccgtcgacggaagcaacgccaacgcctactttggatacagcaccccctgggggtactttgactttaaccgcttccacagccactggagccccctggactggcaaagactcatcaacaactactggggcttcagaccccggtccctcagagtcaaaatcttcaacattcaagtcaaagaggtcacggtgcaggactccaccaccaccatcgccaacaacctcacctccaccgtccaagtgtttacggacgacgactaccagctgccctacgtcgtcggcaacgggaccgagggatgcctgccggccttccctccgcaggtctttacgctgccgcagtacggttacgcgacgctgaaccgcgacaacacagaaaatcccaccgagaggagcagcttcttctgcctagagtactttcccagcaagatgctgagaacgggcaacaactttgagtttacctacaactttgaggaggtgcccttccactccagcttcgctcccagtcagaacctcttcaagctggccaacccgctggtggaccagtacttgtaccgcttcgtgagcacaaataacactggcggagtccagttcaacaagaacctggccgggagatacgccaacacctacaaaaactggttcccggggcccatgggccgaacccagggctggaacctgggctccggggtcaaccgcgccagtgtcagcgccttcgccacgaccaataggatggagctcgagggcgcgagttaccaggtgcccccgcagccgaacggcatgaccaacaacctccagggcagcaacacctatgccctggagaacactatgatcttcaacagccagccggcgaacccgggcaccaccgccacgtacctcgagggcaacatgctcatcaccagcgagagcgagacgcagccggtgaaccgcgtggcgtacaacgtcggcgggcagatggccaccaacaaccagagctccaccactgcccccgcgaccggcacgtacaacctccaggaaatcgtgcccggcagcgtgtggatggagagggacgtgtacctccaaggacccatctgggccaagatcccagagacgggggcgcactttcacccctctccggccatgggcggattcggactcaaacacccaccgcccatgatgctcatcaagaacacgcctgtgcccggaaatatcaccagcttctcggacgtgcccgtcagcagcttcatcacccagtacagcaccgggcaggtcaccgtggagatggagtgggagctcaagaaggaaaactccaagaggtggaacccagagatccagtacacaaacaactacaacgacccccagtttgtggactttgccccggacagcaccggggaatacagaagcaccagacctatcggaacccgataccttacccgacccctttaa

SEQ ID NO: 188 - protein, 724 aa, synthetic construct
MAFVDHPPDWLEEVGEGLREFLGLEAGPPKPKPNQQHQDQARGLVLPGYNYLGPGNGLDRGEPVNRADEVAREHDISYNEQLEAGDNPYLKYNHADAEFQEKLADDTSFGGNLGKAVFQAKKRVLEPFGLVEEGAKTAPTGKRIDDHFPKRKKARTEEDSKPSTSSDAEAGPSGSQQLQIPAQPASSLGADTMSAGGGGPLGDNNQGADGVGNASGDWHCDSTWMGDRVVTKSTRTWVLPSYNNHQYREIKSGSVDGSNANAYFGYSTPWGYFDFNRFHSHWSPLDWQRLINNYWGFRPRSLRVKIFNIQVKEVTVQDSTTTIANNLTSTVQVFTDDDYQLPYVVGNGTEGCLPAFPPQVFTLPQYGYATLNRDNTENPTERSSFFCLEYFPSKMLRTGNNFEFTYNFEEVPFHSSFAPSQNLFKLANPLVDQYLYRFVSTNNTGGVQFNKNLAGRYANTYKNWFPGPMGRTQGWNLGSGVNRASVSAFATTNRMELEGASYQVPPQPNGMTNNLQGSNTYALENTMIFNSQPANPGTTATYLEGNMLITSESETQPVNRVAYNVGGQMATNNQSSTTAPATGTYNLQEIVPGSVWMERDVYLQGPIWAKIPETGAHFHPSPAMGGFGLKHPPPMMLIKNTPVPGNITSFSDVPVSSFITQYSTGQVTVEMEWELKKENSKRWNPEIQYTNNYNDPQFVDFAPDSTGEYRSTRPIGTRYLTRPL

SEQ ID NO: 189 - DNA, 1767 bp, synthetic construct
  source 1..1767: mol_type = other DNA
acggcccctaccggaaagcggatagacgaccactttccaaaaagaaagaaggctcggaccgaagaggactccaagccttccacctcgtcagacgccgaagctggacccagcggatcccagcagctgcaaatcccagcccaaccagcctcaagtttgggagctgatacaatgtctgcgggaggtggcggcccattgggcgacaataaccaaggtgccgatggagtgggcaatgcctcgggagattggcattgcgattccacgtggatgggggacagagtcgtcaccaagtccacccgaacctgggtgctgcccagctacaacaaccaccagtaccgagagatcaaaagcggctccgtcgacggaagcaacgccaacgcctactttggatacagcaccccctgggggtactttgactttaaccgcttccacagccactggagccccctggactggcaaagactcatcaacaactactggggcttcagaccccggtccctcagagtcaaaatcttcaacattcaagtcaaagaggtcacggtgcaggactccaccaccaccatcgccaacaacctcacctccaccgtccaagtgtttacggacgacgactaccagctgccctacgtcgtcggcaacgggaccgagggatgcctgccggccttccctccgcaggtctttacgctgccgcagtacggttacgcgacgctgaaccgcgacaacacagaaaatcccaccgagaggagcagcttcttctgcctagagtactttcccagcaagatgctgagaacgggcaacaactttgagtttacctacaactttgaggaggtgcccttccactccagcttcgctcccagtcagaacctcttcaagctggccaacccgctggtggaccagtacttgtaccgcttcgtgagcacaaataacactggcggagtccagttcaacaagaacctggccgggagatacgccaacacctacaaaaactggttcccggggcccatgggccgaacccagggctggaacctgggctccggggtcaaccgcgccagtgtcagcgccttcgccacgaccaataggatggagctcgagggcgcgagttaccaggtgcccccgcagccgaacggcatgaccaacaacctccagggcagcaacacctatgccctggagaacactatgatcttcaacagccagccggcgaacccgggcaccaccgccacgtacctcgagggcaacatgctcatcaccagcgagagcgagacgcagccggtgaaccgcgtggcgtacaacgtcggcgggcagatggccaccaacaaccagagctccaccactgcccccgcgaccggcacgtacaacctccaggaaatcgtgcccggcagcgtgtggatggagagggacgtgtacctccaaggacccatctgggccaagatcccagagacgggggcgcactttcacccctctccggccatgggcggattcggactcaaacacccaccgcccatgatgctcatcaagaacacgcctgtgcccggaaatatcaccagcttctcggacgtgcccgtcagcagcttcatcacccagtacagcaccgggcaggtcaccgtggagatggagtgggagctcaagaaggaaaactccaagaggtggaacccagagatccagtacacaaacaactacaacgacccccagtttgtggactttgccccggacagcaccggggaatacagaagcaccagacctatcggaacccgataccttacccgacccctttaa

SEQ ID NO: 190 - protein, 588 aa, synthetic construct
TAPTGKRIDDHFPKRKKARTEEDSKPSTSSDAEAGPSGSQQLQIPAQPASSLGADTMSAGGGGPLGDNNQGADGVGNASGDWHCDSTWMGDRVVTKSTRTWVLPSYNNHQYREIKSGSVDGSNANAYFGYSTPWGYFDFNRFHSHWSPLDWQRLINNYWGFRPRSLRVKIFNIQVKEVTVQDSTTTIANNLTSTVQVFTDDDYQLPYVVGNGTEGCLPAFPPQVFTLPQYGYATLNRDNTENPTERSSFFCLEYFPSKMLRTGNNFEFTYNFEEVPFHSSFAPSQNLFKLANPLVDQYLYRFVSTNNTGGVQFNKNLAGRYANTYKNWFPGPMGRTQGWNLGSGVNRASVSAFATTNRMELEGASYQVPPQPNGMTNNLQGSNTYALENTMIFNSQPANPGTTATYLEGNMLITSESETQPVNRVAYNVGGQMATNNQSSTTAPATGTYNLQEIVPGSVWMERDVYLQGPIWAKIPETGAHFHPSPAMGGFGLKHPPPMMLIKNTPVPGNITSFSDVPVSSFITQYSTGQVTVEMEWELKKENSKRWNPEIQYTNNYNDPQFVDFAPDSTGEYRSTRPIGTRYLTRPL

SEQ ID NO: 191 - DNA, 1599 bp, synthetic construct
  source 1..1599: mol_type = other DNA
atgtctgcgggaggtggcggcccattgggcgacaataaccaaggtgccgatggagtgggcaatgcctcgggagattggcattgcgattccacgtggatgggggacagagtcgtcaccaagtccacccgaacctgggtgctgcccagctacaacaaccaccagtaccgagagatcaaaagcggctccgtcgacggaagcaacgccaacgcctactttggatacagcaccccctgggggtactttgactttaaccgcttccacagccactggagccccctggactggcaaagactcatcaacaactactggggcttcagaccccggtccctcagagtcaaaatcttcaacattcaagtcaaagaggtcacggtgcaggactccaccaccaccatcgccaacaacctcacctccaccgtccaagtgtttacggacgacgactaccagctgccctacgtcgtcggcaacgggaccgagggatgcctgccggccttccctccgcaggtctttacgctgccgcagtacggttacgcgacgctgaaccgcgacaacacagaaaatcccaccgagaggagcagcttcttctgcctagagtactttcccagcaagatgctgagaacgggcaacaactttgagtttacctacaactttgaggaggtgcccttccactccagcttcgctcccagtcagaacctcttcaagctggccaacccgctggtggaccagtacttgtaccgcttcgtgagcacaaataacactggcggagtccagttcaacaagaacctggccgggagatacgccaacacctacaaaaactggttcccggggcccatgggccgaacccagggctggaacctgggctccggggtcaaccgcgccagtgtcagcgccttcgccacgaccaataggatggagctcgagggcgcgagttaccaggtgcccccgcagccgaacggcatgaccaacaacctccagggcagcaacacctatgccctggagaacactatgatcttcaacagccagccggcgaacccgggcaccaccgccacgtacctcgagggcaacatgctcatcaccagcgagagcgagacgcagccggtgaaccgcgtggcgtacaacgtcggcgggcagatggccaccaacaaccagagctccaccactgcccccgcgaccggcacgtacaacctccaggaaatcgtgcccggcagcgtgtggatggagagggacgtgtacctccaaggacccatctgggccaagatcccagagacgggggcgcactttcacccctctccggccatgggcggattcggactcaaacacccaccgcccatgatgctcatcaagaacacgcctgtgcccggaaatatcaccagcttctcggacgtgcccgtcagcagcttcatcacccagtacagcaccgggcaggtcaccgtggagatggagtgggagctcaagaaggaaaactccaagaggtggaacccagagatccagtacacaaacaactacaacgacccccagtttgtggactttgccccggacagcaccggggaatacagaagcaccagacctatcggaacccgataccttacccgacccctttaa

SEQ ID NO: 192 - protein, 532 aa, synthetic construct
MSAGGGGPLGDNNQGADGVGNASGDWHCDSTWMGDRVVTKSTRTWVLPSYNNHQYREIKSGSVDGSNANAYFGYSTPWGYFDFNRFHSHWSPLDWQRLINNYWGFRPRSLRVKIFNIQVKEVTVQDSTTTIANNLTSTVQVFTDDDYQLPYVVGNGTEGCLPAFPPQVFTLPQYGYATLNRDNTENPTERSSFFCLEYFPSKMLRTGNNFEFTYNFEEVPFHSSFAPSQNLFKLANPLVDQYLYRFVSTNNTGGVQFNKNLAGRYANTYKNWFPGPMGRTQGWNLGSGVNRASVSAFATTNRMELEGASYQVPPQPNGMTNNLQGSNTYALENTMIFNSQPANPGTTATYLEGNMLITSESETQPVNRVAYNVGGQMATNNQSSTTAPATGTYNLQEIVPGSVWMERDVYLQGPIWAKIPETGAHFHPSPAMGGFGLKHPPPMMLIKNTPVPGNITSFSDVPVSSFITQYSTGQVTVEMEWELKKENSKRWNPEIQYTNNYNDPQFVDFAPDSTGEYRSTRPIGTRYLTRPL

SEQ ID NO: 193 - DNA, 2175 bp, synthetic construct
  source 1..2175: mol_type = other DNA
atgtcttttgttgatcaccctccagattggttggaagaagttggtgaaggtcttcgcgagtttttgggccttgaagcgggcccaccgaaaccaaaacccaatcagcagcatcaagatcaagcccgtggtcttgtgctgcctggttataactatctcggacccggaaacggtctcgatcgaggagagcctgtcaacagggcagacgaggtcgcgcgagagcacgacatctcgtacaacgagcagcttgaggcgggagacaacccctacctcaagtacaaccacgcggacgccgagtttcaggagaagctcgccgacgacacatccttcgggggaaacctcggaaaggcagtctttcaggccaagaaaagggttctcgaaccttttggcctggttgaagagggtgctaagacggcccctaccggaaagcggatagacgaccactttccaaaaagaaagaaggctcggaccgaagaggactccaagccttccacctcgtcagacgccgaagctggacccagcggatcccagcagctgcaaatcccagcccaaccagcctcaagtttgggagctgatacaatgtctgcgggaggtggcggcccattgggcgacaataaccaaggtgccgatggagtgggcaatgcctcgggagattggcattgcgattccacgtggatgggggacagagtcgtcaccaagtccacccgaacctgggtgctgcccagctacaacaaccaccagtaccgagagatcaaaagcggctccgtcgacggaagcaacgccaacgcctactttggatacagcaccccctgggggtactttgactttaaccgcttccacagccactggagcccccgagactggcaaagactcatcaacaactactggggcttcagaccccggtccctcagagtcaaaatcttcaacattcaagtcaaagaggtcacggtgcaggactccaccaccaccatcgccaacaacctcacctccaccgtccaagtgtttacggacgacgactacgccctgccctacgtcgtcggcaacgggaccgagggatgcctgccggccttccctccgcaggtctttacgctgccgcagtacggttacgcgacgctgaaccgcgacaacacagaaaatcccaccgagaggagcagcttcttctgcctagagtactttcccagcaagatgctgagaacgggcaacaactttgagtttacctacaactttgaggaggtgcccttccactccagcttcgctcccagtcagaacctcttcaagctggccaacccgctggtggaccagtacttgtaccgcttcgtgagcacaaataacactggcggagtccagttcaacaagaacctggccgggagatacgccaacacctacaaaaactggttcccggggcccatgggccgaacccagggctggaacctgggctccggggtcaaccgcgccagtgtcagcgccttcgccacgaccaataggatggagctcgagggcgcgagttaccaggtgcccccgcagccgaacggcatgaccaacaacctccagggcagcaacacctatgccctggagaacactatgatcttcaacagccagccggcgaacccgggcaccaccgccacgtacctcgagggcaacatgctcatcaccagcgagagcgagacgcagccggtgaaccgcgtggcgtacaacgtcggcgggcagatggccaccaacaaccagagctccaccactgcccccgcgaccggcacgtacaacctccaggaaatcgtgcccggcagcgtgtggatggagagggacgtgtacctccaaggacccatctgggccaagatcccagagacgggggcgcactttcacccctctccggccatgggcggattcggactcaaacacccaccgcccatgatgctcatcaagaacacgcctgtgcccggaaatatcaccagcttctcggacgtgcccgtcagcagcttcatcacccagtacagcaccgggcaggtcaccgtggagatggagtgggagctcaagaaggaaaactccaagaggtggaacccagagatccagtacacaaacaactacaacgacccccagtttgtggactttgccccggacagcaccggggaatacagaaccaccagacctatcggaacccgataccttacccgacccctttaa

SEQ ID NO: 194 - protein, 724 aa, synthetic construct
MSFVDHPPDWLEEVGEGLREFLGLEAGPPKPKPNQQHQDQARGLVLPGYNYLGPGNGLDRGEPVNRADEVAREHDISYNEQLEAGDNPYLKYNHADAEFQEKLADDTSFGGNLGKAVFQAKKRVLEPFGLVEEGAKTAPTGKRIDDHFPKRKKARTEEDSKPSTSSDAEAGPSGSQQLQIPAQPASSLGADTMSAGGGGPLGDNNQGADGVGNASGDWHCDSTWMGDRVVTKSTRTWVLPSYNNHQYREIKSGSVDGSNANAYFGYSTPWGYFDFNRFHSHWSPRDWQRLINNYWGFRPRSLRVKIFNIQVKEVTVQDSTTTIANNLTSTVQVFTDDDYALPYVVGNGTEGCLPAFPPQVFTLPQYGYATLNRDNTENPTERSSFFCLEYFPSKMLRTGNNFEFTYNFEEVPFHSSFAPSQNLFKLANPLVDQYLYRFVSTNNTGGVQFNKNLAGRYANTYKNWFPGPMGRTQGWNLGSGVNRASVSAFATTNRMELEGASYQVPPQPNGMTNNLQGSNTYALENTMIFNSQPANPGTTATYLEGNMLITSESETQPVNRVAYNVGGQMATNNQSSTTAPATGTYNLQEIVPGSVWMERDVYLQGPIWAKIPETGAHFHPSPAMGGFGLKHPPPMMLIKNTPVPGNITSFSDVPVSSFITQYSTGQVTVEMEWELKKENSKRWNPEIQYTNNYNDPQFVDFAPDSTGEYRTTRPIGTRYLTRPL

SEQ ID NO: 195 - DNA, 1767 bp, synthetic construct
  source 1..1767: mol_type = other DNA
acggcccctaccggaaagcggatagacgaccactttccaaaaagaaagaaggctcggaccgaagaggactccaagccttccacctcgtcagacgccgaagctggacccagcggatcccagcagctgcaaatcccagcccaaccagcctcaagtttgggagctgatacaatgtctgcgggaggtggcggcccattgggcgacaataaccaaggtgccgatggagtgggcaatgcctcgggagattggcattgcgattccacgtggatgggggacagagtcgtcaccaagtccacccgaacctgggtgctgcccagctacaacaaccaccagtaccgagagatcaaaagcggctccgtcgacggaagcaacgccaacgcctactttggatacagcaccccctgggggtactttgactttaaccgcttccacagccactggagcccccgagactggcaaagactcatcaacaactactggggcttcagaccccggtccctcagagtcaaaatcttcaacattcaagtcaaagaggtcacggtgcaggactccaccaccaccatcgccaacaacctcacctccaccgtccaagtgtttacggacgacgactacgccctgccctacgtcgtcggcaacgggaccgagggatgcctgccggccttccctccgcaggtctttacgctgccgcagtacggttacgcgacgctgaaccgcgacaacacagaaaatcccaccgagaggagcagcttcttctgcctagagtactttcccagcaagatgctgagaacgggcaacaactttgagtttacctacaactttgaggaggtgcccttccactccagcttcgctcccagtcagaacctcttcaagctggccaacccgctggtggaccagtacttgtaccgcttcgtgagcacaaataacactggcggagtccagttcaacaagaacctggccgggagatacgccaacacctacaaaaactggttcccggggcccatgggccgaacccagggctggaacctgggctccggggtcaaccgcgccagtgtcagcgccttcgccacgaccaataggatggagctcgagggcgcgagttaccaggtgcccccgcagccgaacggcatgaccaacaacctccagggcagcaacacctatgccctggagaacactatgatcttcaacagccagccggcgaacccgggcaccaccgccacgtacctcgagggcaacatgctcatcaccagcgagagcgagacgcagccggtgaaccgcgtggcgtacaacgtcggcgggcagatggccaccaacaaccagagctccaccactgcccccgcgaccggcacgtacaacctccaggaaatcgtgcccggcagcgtgtggatggagagggacgtgtacctccaaggacccatctgggccaagatcccagagacgggggcgcactttcacccctctccggccatgggcggattcggactcaaacacccaccgcccatgatgctcatcaagaacacgcctgtgcccggaaatatcaccagcttctcggacgtgcccgtcagcagcttcatcacccagtacagcaccgggcaggtcaccgtggagatggagtgggagctcaagaaggaaaactccaagaggtggaacccagagatccagtacacaaacaactacaacgacccccagtttgtggactttgccccggacagcaccggggaatacagaaccaccagacctatcggaacccgataccttacccgacccctttaa

SEQ ID NO: 196 - protein, 588 aa, synthetic construct
TAPTGKRIDDHFPKRKKARTEEDSKPSTSSDAEAGPSGSQQLQIPAQPASSLGADTMSAGGGGPLGDNNQGADGVGNASGDWHCDSTWMGDRVVTKSTRTWVLPSYNNHQYREIKSGSVDGSNANAYFGYSTPWGYFDFNRFHSHWSPRDWQRLINNYWGFRPRSLRVKIFNIQVKEVTVQDSTTTIANNLTSTVQVFTDDDYALPYVVGNGTEGCLPAFPPQVFTLPQYGYATLNRDNTENPTERSSFFCLEYFPSKMLRTGNNFEFTYNFEEVPFHSSFAPSQNLFKLANPLVDQYLYRFVSTNNTGGVQFNKNLAGRYANTYKNWFPGPMGRTQGWNLGSGVNRASVSAFATTNRMELEGASYQVPPQPNGMTNNLQGSNTYALENTMIFNSQPANPGTTATYLEGNMLITSESETQPVNRVAYNVGGQMATNNQSSTTAPATGTYNLQEIVPGSVWMERDVYLQGPIWAKIPETGAHFHPSPAMGGFGLKHPPPMMLIKNTPVPGNITSFSDVPVSSFITQYSTGQVTVEMEWELKKENSKRWNPEIQYTNNYNDPQFVDFAPDSTGEYRTTRPIGTRYLTRPL

SEQ ID NO: 197 - DNA, 1599 bp, synthetic construct
  source 1..1599: mol_type = other DNA
atgtctgcgggaggtggcggcccattgggcgacaataaccaaggtgccgatggagtgggcaatgcctcgggagattggcattgcgattccacgtggatgggggacagagtcgtcaccaagtccacccgaacctgggtgctgcccagctacaacaaccaccagtaccgagagatcaaaagcggctccgtcgacggaagcaacgccaacgcctactttggatacagcaccccctgggggtactttgactttaaccgcttccacagccactggagcccccgagactggcaaagactcatcaacaactactggggcttcagaccccggtccctcagagtcaaaatcttcaacattcaagtcaaagaggtcacggtgcaggactccaccaccaccatcgccaacaacctcacctccaccgtccaagtgtttacggacgacgactacgccctgccctacgtcgtcggcaacgggaccgagggatgcctgccggccttccctccgcaggtctttacgctgccgcagtacggttacgcgacgctgaaccgcgacaacacagaaaatcccaccgagaggagcagcttcttctgcctagagtactttcccagcaagatgctgagaacgggcaacaactttgagtttacctacaactttgaggaggtgcccttccactccagcttcgctcccagtcagaacctcttcaagctggccaacccgctggtggaccagtacttgtaccgcttcgtgagcacaaataacactggcggagtccagttcaacaagaacctggccgggagatacgccaacacctacaaaaactggttcccggggcccatgggccgaacccagggctggaacctgggctccggggtcaaccgcgccagtgtcagcgccttcgccacgaccaataggatggagctcgagggcgcgagttaccaggtgcccccgcagccgaacggcatgaccaacaacctccagggcagcaacacctatgccctggagaacactatgatcttcaacagccagccggcgaacccgggcaccaccgccacgtacctcgagggcaacatgctcatcaccagcgagagcgagacgcagccggtgaaccgcgtggcgtacaacgtcggcgggcagatggccaccaacaaccagagctccaccactgcccccgcgaccggcacgtacaacctccaggaaatcgtgcccggcagcgtgtggatggagagggacgtgtacctccaaggacccatctgggccaagatcccagagacgggggcgcactttcacccctctccggccatgggcggattcggactcaaacacccaccgcccatgatgctcatcaagaacacgcctgtgcccggaaatatcaccagcttctcggacgtgcccgtcagcagcttcatcacccagtacagcaccgggcaggtcaccgtggagatggagtgggagctcaagaaggaaaactccaagaggtggaacccagagatccagtacacaaacaactacaacgacccccagtttgtggactttgccccggacagcaccggggaatacagaaccaccagacctatcggaacccgataccttacccgacccctttaa

SEQ ID NO: 198 - protein, 532 aa, synthetic construct
MSAGGGGPLGDNNQGADGVGNASGDWHCDSTWMGDRVVTKSTRTWVLPSYNNHQYREIKSGSVDGSNANAYFGYSTPWGYFDFNRFHSHWSPRDWQRLINNYWGFRPRSLRVKIFNIQVKEVTVQDSTTTIANNLTSTVQVFTDDDYALPYVVGNGTEGCLPAFPPQVFTLPQYGYATLNRDNTENPTERSSFFCLEYFPSKMLRTGNNFEFTYNFEEVPFHSSFAPSQNLFKLANPLVDQYLYRFVSTNNTGGVQFNKNLAGRYANTYKNWFPGPMGRTQGWNLGSGVNRASVSAFATTNRMELEGASYQVPPQPNGMTNNLQGSNTYALENTMIFNSQPANPGTTATYLEGNMLITSESETQPVNRVAYNVGGQMATNNQSSTTAPATGTYNLQEIVPGSVWMERDVYLQGPIWAKIPETGAHFHPSPAMGGFGLKHPPPMMLIKNTPVPGNITSFSDVPVSSFITQYSTGQVTVEMEWELKKENSKRWNPEIQYTNNYNDPQFVDFAPDSTGEYRTTRPIGTRYLTRPL

SEQ ID NO: 199 - DNA, 2175 bp, synthetic construct
  source 1..2175: mol_type = other DNA
atggcttttgttgatcaccctccagattggttggaagaagttggtgaaggtcttcgcgagtttttgggccttgaagcgggcccaccgaaaccaaaacccaatcagcagcatcaagatcaagcccgtggtcttgtgctgcctggttataactatctcggacccggaaacggtctcgatcgaggagagcctgtcaacagggcagacgaggtcgcgcgagagcacgacatctcgtacaacgagcagcttgaggcgggagacaacccctacctcaagtacaaccacgcggacgccgagtttcaggagaagctcgccgacgacacatccttcgggggaaacctcggaaaggcagtctttcaggccaagaaaagggttctcgaaccttttggcctggttgaagagggtgctaagacggcccctaccggaaagcggatagacgaccactttccaaaaagaaagaaggctcggaccgaagaggactccaagccttccacctcgtcagacgccgaagctggacccagcggatcccagcagctgcaaatcccagcccaaccagcctcaagtttgggagctgatacaatgtctgcgggaggtggcggcccattgggcgacaataaccaaggtgccgatggagtgggcaatgcctcgggagattggcattgcgattccacgtggatgggggacagagtcgtcaccaagtccacccgaacctgggtgctgcccagctacaacaaccaccagtaccgagagatcaaaagcggctccgtcgacggaagcaacgccaacgcctactttggatacagcaccccctgggggtactttgactttaaccgcttccacagccactggagcccccgagactggcaaagactcatcaacaactactggggcttcagaccccggtccctcagagtcaaaatcttcaacattcaagtcaaagaggtcacggtgcaggactccaccaccaccatcgccaacaacctcacctccaccgtccaagtgtttacggacgacgactacgccctgccctacgtcgtcggcaacgggaccgagggatgcctgccggccttccctccgcaggtctttacgctgccgcagtacggttacgcgacgctgaaccgcgacaacacagaaaatcccaccgagaggagcagcttcttctgcctagagtactttcccagcaagatgctgagaacgggcaacaactttgagtttacctacaactttgaggaggtgcccttccactccagcttcgctcccagtcagaacctcttcaagctggccaacccgctggtggaccagtacttgtaccgcttcgtgagcacaaataacactggcggagtccagttcaacaagaacctggccgggagatacgccaacacctacaaaaactggttcccggggcccatgggccgaacccagggctggaacctgggctccggggtcaaccgcgccagtgtcagcgccttcgccacgaccaataggatggagctcgagggcgcgagttaccaggtgcccccgcagccgaacggcatgaccaacaacctccagggcagcaacacctatgccctggagaacactatgatcttcaacagccagccggcgaacccgggcaccaccgccacgtacctcgagggcaacatgctcatcaccagcgagagcgagacgcagccggtgaaccgcgtggcgtacaacgtcggcgggcagatggccaccaacaaccagagctccaccactgcccccgcgaccggcacgtacaacctccaggaaatcgtgcccggcagcgtgtggatggagagggacgtgtacctccaaggacccatctgggccaagatcccagagacgggggcgcactttcacccctctccggccatgggcggattcggactcaaacacccaccgcccatgatgctcatcaagaacacgcctgtgcccggaaatatcaccagcttctcggacgtgcccgtcagcagcttcatcacccagtacagcaccgggcaggtcaccgtggagatggagtgggagctcaagaaggaaaactccaagaggtggaacccagagatccagtacacaaacaactacaacgacccccagtttgtggactttgccccggacagcaccggggaatacagaagcaccagacctatcggaacccgataccttacccgacccctttaa

SEQ ID NO: 200 - protein, 724 aa, synthetic construct
MAFVDHPPDWLEEVGEGLREFLGLEAGPPKPKPNQQHQDQARGLVLPGYNYLGPGNGLDRGEPVNRADEVAREHDISYNEQLEAGDNPYLKYNHADAEFQEKLADDTSFGGNLGKAVFQAKKRVLEPFGLVEEGAKTAPTGKRIDDHFPKRKKARTEEDSKPSTSSDAEAGPSGSQQLQIPAQPASSLGADTMSAGGGGPLGDNNQGADGVGNASGDWHCDSTWMGDRVVTKSTRTWVLPSYNNHQYREIKSGSVDGSNANAYFGYSTPWGYFDFNRFHSHWSPRDWQRLINNYWGFRPRSLRVKIFNIQVKEVTVQDSTTTIANNLTSTVQVFTDDDYALPYVVGNGTEGCLPAFPPQVFTLPQYGYATLNRDNTENPTERSSFFCLEYFPSKMLRTGNNFEFTYNFEEVPFHSSFAPSQNLFKLANPLVDQYLYRFVSTNNTGGVQFNKNLAGRYANTYKNWFPGPMGRTQGWNLGSGVNRASVSAFATTNRMELEGASYQVPPQPNGMTNNLQGSNTYALENTMIFNSQPANPGTTATYLEGNMLITSESETQPVNRVAYNVGGQMATNNQSSTTAPATGTYNLQEIVPGSVWMERDVYLQGPIWAKIPETGAHFHPSPAMGGFGLKHPPPMMLIKNTPVPGNITSFSDVPVSSFITQYSTGQVTVEMEWELKKENSKRWNPEIQYTNNYNDPQFVDFAPDSTGEYRSTRPIGTRYLTRPL

SEQ ID NO: 201 - DNA, 1767 bp, synthetic construct
  source 1..1767: mol_type = other DNA
acggcccctaccggaaagcggatagacgaccactttccaaaaagaaagaaggctcggaccgaagaggactccaagccttccacctcgtcagacgccgaagctggacccagcggatcccagcagctgcaaatcccagcccaaccagcctcaagtttgggagctgatacaatgtctgcgggaggtggcggcccattgggcgacaataaccaaggtgccgatggagtgggcaatgcctcgggagattggcattgcgattccacgtggatgggggacagagtcgtcaccaagtccacccgaacctgggtgctgcccagctacaacaaccaccagtaccgagagatcaaaagcggctccgtcgacggaagcaacgccaacgcctactttggatacagcaccccctgggggtactttgactttaaccgcttccacagccactggagcccccgagactggcaaagactcatcaacaactactggggcttcagaccccggtccctcagagtcaaaatcttcaacattcaagtcaaagaggtcacggtgcaggactccaccaccaccatcgccaacaacctcacctccaccgtccaagtgtttacggacgacgactacgccctgccctacgtcgtcggcaacgggaccgagggatgcctgccggccttccctccgcaggtctttacgctgccgcagtacggttacgcgacgctgaaccgcgacaacacagaaaatcccaccgagaggagcagcttcttctgcctagagtactttcccagcaagatgctgagaacgggcaacaactttgagtttacctacaactttgaggaggtgcccttccactccagcttcgctcccagtcagaacctcttcaagctggccaacccgctggtggaccagtacttgtaccgcttcgtgagcacaaataacactggcggagtccagttcaacaagaacctggccgggagatacgccaacacctacaaaaactggttcccggggcccatgggccgaacccagggctggaacctgggctccggggtcaaccgcgccagtgtcagcgccttcgccacgaccaataggatggagctcgagggcgcgagttaccaggtgcccccgcagccgaacggcatgaccaacaacctccagggcagcaacacctatgccctggagaacactatgatcttcaacagccagccggcgaacccgggcaccaccgccacgtacctcgagggcaacatgctcatcaccagcgagagcgagacgcagccggtgaaccgcgtggcgtacaacgtcggcgggcagatggccaccaacaaccagagctccaccactgcccccgcgaccggcacgtacaacctccaggaaatcgtgcccggcagcgtgtggatggagagggacgtgtacctccaaggacccatctgggccaagatcccagagacgggggcgcactttcacccctctccggccatgggcggattcggactcaaacacccaccgcccatgatgctcatcaagaacacgcctgtgcccggaaatatcaccagcttctcggacgtgcccgtcagcagcttcatcacccagtacagcaccgggcaggtcaccgtggagatggagtgggagctcaagaaggaaaactccaagaggtggaacccagagatccagtacacaaacaactacaacgacccccagtttgtggactttgccccggacagcaccggggaatacagaagcaccagacctatcggaacccgataccttacccgacccctttaa

SEQ ID NO: 202 - protein, 588 aa, synthetic construct
TAPTGKRIDDHFPKRKKARTEEDSKPSTSSDAEAGPSGSQQLQIPAQPASSLGADTMSAGGGGPLGDNNQGADGVGNASGDWHCDSTWMGDRVVTKSTRTWVLPSYNNHQYREIKSGSVDGSNANAYFGYSTPWGYFDFNRFHSHWSPRDWQRLINNYWGFRPRSLRVKIFNIQVKEVTVQDSTTTIANNLTSTVQVFTDDDYALPYVVGNGTEGCLPAFPPQVFTLPQYGYATLNRDNTENPTERSSFFCLEYFPSKMLRTGNNFEFTYNFEEVPFHSSFAPSQNLFKLANPLVDQYLYRFVSTNNTGGVQFNKNLAGRYANTYKNWFPGPMGRTQGWNLGSGVNRASVSAFATTNRMELEGASYQVPPQPNGMTNNLQGSNTYALENTMIFNSQPANPGTTATYLEGNMLITSESETQPVNRVAYNVGGQMATNNQSSTTAPATGTYNLQEIVPGSVWMERDVYLQGPIWAKIPETGAHFHPSPAMGGFGLKHPPPMMLIKNTPVPGNITSFSDVPVSSFITQYSTGQVTVEMEWELKKENSKRWNPEIQYTNNYNDPQFVDFAPDSTGEYRSTRPIGTRYLTRPL

SEQ ID NO: 203 - DNA, 1599 bp, synthetic construct
  source 1..1599: mol_type = other DNA
atgtctgcgggaggtggcggcccattgggcgacaataaccaaggtgccgatggagtgggcaatgcctcgggagattggcattgcgattccacgtggatgggggacagagtcgtcaccaagtccacccgaacctgggtgctgcccagctacaacaaccaccagtaccgagagatcaaaagcggctccgtcgacggaagcaacgccaacgcctactttggatacagcaccccctgggggtactttgactttaaccgcttccacagccactggagcccccgagactggcaaagactcatcaacaactactggggcttcagaccccggtccctcagagtcaaaatcttcaacattcaagtcaaagaggtcacggtgcaggactccaccaccaccatcgccaacaacctcacctccaccgtccaagtgtttacggacgacgactacgccctgccctacgtcgtcggcaacgggaccgagggatgcctgccggccttccctccgcaggtctttacgctgccgcagtacggttacgcgacgctgaaccgcgacaacacagaaaatcccaccgagaggagcagcttcttctgcctagagtactttcccagcaagatgctgagaacgggcaacaactttgagtttacctacaactttgaggaggtgcccttccactccagcttcgctcccagtcagaacctcttcaagctggccaacccgctggtggaccagtacttgtaccgcttcgtgagcacaaataacactggcggagtccagttcaacaagaacctggccgggagatacgccaacacctacaaaaactggttcccggggcccatgggccgaacccagggctggaacctgggctccggggtcaaccgcgccagtgtcagcgccttcgccacgaccaataggatggagctcgagggcgcgagttaccaggtgcccccgcagccgaacggcatgaccaacaacctccagggcagcaacacctatgccctggagaacactatgatcttcaacagccagccggcgaacccgggcaccaccgccacgtacctcgagggcaacatgctcatcaccagcgagagcgagacgcagccggtgaaccgcgtggcgtacaacgtcggcgggcagatggccaccaacaaccagagctccaccactgcccccgcgaccggcacgtacaacctccaggaaatcgtgcccggcagcgtgtggatggagagggacgtgtacctccaaggacccatctgggccaagatcccagagacgggggcgcactttcacccctctccggccatgggcggattcggactcaaacacccaccgcccatgatgctcatcaagaacacgcctgtgcccggaaatatcaccagcttctcggacgtgcccgtcagcagcttcatcacccagtacagcaccgggcaggtcaccgtggagatggagtgggagctcaagaaggaaaactccaagaggtggaacccagagatccagtacacaaacaactacaacgacccccagtttgtggactttgccccggacagcaccggggaatacagaagcaccagacctatcggaacccgataccttacccgacccctttaa

SEQ ID NO: 204 - protein, 532 aa, synthetic construct
MSAGGGGPLGDNNQGADGVGNASGDWHCDSTWMGDRVVTKSTRTWVLPSYNNHQYREIKSGSVDGSNANAYFGYSTPWGYFDFNRFHSHWSPRDWQRLINNYWGFRPRSLRVKIFNIQVKEVTVQDSTTTIANNLTSTVQVFTDDDYALPYVVGNGTEGCLPAFPPQVFTLPQYGYATLNRDNTENPTERSSFFCLEYFPSKMLRTGNNFEFTYNFEEVPFHSSFAPSQNLFKLANPLVDQYLYRFVSTNNTGGVQFNKNLAGRYANTYKNWFPGPMGRTQGWNLGSGVNRASVSAFATTNRMELEGASYQVPPQPNGMTNNLQGSNTYALENTMIFNSQPANPGTTATYLEGNMLITSESETQPVNRVAYNVGGQMATNNQSSTTAPATGTYNLQEIVPGSVWMERDVYLQGPIWAKIPETGAHFHPSPAMGGFGLKHPPPMMLIKNTPVPGNITSFSDVPVSSFITQYSTGQVTVEMEWELKKENSKRWNPEIQYTNNYNDPQFVDFAPDSTGEYRSTRPIGTRYLTRPL

SEQ ID NO: 205 - DNA, 2175 bp, synthetic construct
  source 1..2175: mol_type = other DNA
atgtcttttgttgatcaccctccagattggttggaagaagttggtgaaggtcttcgcgagtttttgggccttgaagcgggcccaccgaaaccaaaacccaatcagcagcatcaagatcaagcccgtggtcttgtgctgcctggttataactatctcggacccggaaacggtctcgatcgaggagagcctgtcaacagggcagacgaggtcgcgcgagagcacgacatctcgtacaacgagcagcttgaggcgggagacaacccctacctcaagtacaaccacgcggacgccgagtttcaggagaagctcgccgacgacacatccttcgggggaaacctcggaaaggcagtctttcaggccaagaaaagggttctcgaaccttttggcctggttgaagagggtgctaagacggcccctaccggaaagcggatagacgaccactttccaaaaagaaagaaggctcggaccgaagaggactccaagccttccacctcgtcagacgccgaagctggacccagcggatcccagcagctgcaaatcccagcccaaccagcctcaagtttgggagctgatacaatgtctgcgggaggtggcggcccattgggcgacaataaccaaggtgccgatggagtgggcaatgcctcgggagattggcattgcgattccacgtggatgggggacagagtcgtcaccaagtccacccgaacctgggtgctgcccagctacaacaaccaccagtaccgagagatcaaaagcggctccgtcgacggaagcaacgccaacgcctactttggatacagcaccccctgggggtactttgactttaaccgcttccacagccactggagcccccgagactggcaaagactcatcaacaactactggggcttcagaccccggtccctcagagtcaaaatcttcaacattcaagtcaaagaggtcacggtgcaggactccaccaccaccatcgccaacaacctcacctccaccgtccaagtgtttacggacgacgactaccagctgccctacgtcgtcggcaacgggaccgagggatgcctgccggccttccctccgcaggtctttacgctgccgcagtacggttacgcgacgctgaaccgcgacaacacagaaaatcccaccgagaggagcagcttcttctgcctagagtactttcccagcaagatgctgagaacgggcaacaactttgagtttacctacaactttgaggaggtgcccttccactccagcttcgctcccttccagaacctcttcaagctggccaacccgctggtggaccagtacttgtaccgcttcgtgagcacaaataacactggcggagtccagttcaacaagaacctggccgggagatacgccaacacctacaaaaactggttcccggggcccatgggccgaacccagggctggaacctgggctccggggtcaaccgcgccagtgtcagcgccttcgccacgaccaataggatggagctcgagggcgcgagttaccaggtgcccccgcagccgaacggcatgaccaacaacctccagggcagcaacacctatgccctggagaacactatgatcttcaacagccagccggcgaacccgggcaccaccgccacgtacctcgagggcaacatgctcatcaccagcgagagcgagacgcagccggtgaaccgcgtggcgtacaacgtcggcgggcagatggccaccaacaaccagagctccaccactgcccccgcgaccggcacgtacaacctccaggaaatcgtgcccggcagcgtgtggatggagagggacgtgtacctccaaggacccatctgggccaagatcccagagacgggggcgcactttcacccctctccggccatgggcggattcggactcaaacacccaccgcccatgatgctcatcaagaacacgcctgtgcccggaaatatcaccagcttctcggacgtgcccgtcagcagcttcatcacccagtacagcaccgggcaggtcaccgtggagatggagtgggagctcaagaaggaaaactccaagaggtggaacccagagatccagtacacaaacaactacaacgacccccagtttgtggactttgccccggacagcaccggggaatacagaaccaccagacctatcggaacccgataccttacccgacccctttaa

SEQ ID NO: 206 - protein, 724 aa, synthetic construct
MSFVDHPPDWLEEVGEGLREFLGLEAGPPKPKPNQQHQDQARGLVLPGYNYLGPGNGLDRGEPVNRADEVAREHDISYNEQLEAGDNPYLKYNHADAEFQEKLADDTSFGGNLGKAVFQAKKRVLEPFGLVEEGAKTAPTGKRIDDHFPKRKKARTEEDSKPSTSSDAEAGPSGSQQLQIPAQPASSLGADTMSAGGGGPLGDNNQGADGVGNASGDWHCDSTWMGDRVVTKSTRTWVLPSYNNHQYREIKSGSVDGSNANAYFGYSTPWGYFDFNRFHSHWSPRDWQRLINNYWGFRPRSLRVKIFNIQVKEVTVQDSTTTIANNLTSTVQVFTDDDYQLPYVVGNGTEGCLPAFPPQVFTLPQYGYATLNRDNTENPTERSSFFCLEYFPSKMLRTGNNFEFTYNFEEVPFHSSFAPFQNLFKLANPLVDQYLYRFVSTNNTGGVQFNKNLAGRYANTYKNWFPGPMGRTQGWNLGSGVNRASVSAFATTNRMELEGASYQVPPQPNGMTNNLQGSNTYALENTMIFNSQPANPGTTATYLEGNMLITSESETQPVNRVAYNVGGQMATNNQSSTTAPATGTYNLQEIVPGSVWMERDVYLQGPIWAKIPETGAHFHPSPAMGGFGLKHPPPMMLIKNTPVPGNITSFSDVPVSSFITQYSTGQVTVEMEWELKKENSKRWNPEIQYTNNYNDPQFVDFAPDSTGEYRTTRPIGTRYLTRPL

SEQ ID NO: 207 - DNA, 1767 bp, synthetic construct
  source 1..1767: mol_type = other DNA
acggcccctaccggaaagcggatagacgaccactttccaaaaagaaagaaggctcggaccgaagaggactccaagccttccacctcgtcagacgccgaagctggacccagcggatcccagcagctgcaaatcccagcccaaccagcctcaagtttgggagctgatacaatgtctgcgggaggtggcggcccattgggcgacaataaccaaggtgccgatggagtgggcaatgcctcgggagattggcattgcgattccacgtggatgggggacagagtcgtcaccaagtccacccgaacctgggtgctgcccagctacaacaaccaccagtaccgagagatcaaaagcggctccgtcgacggaagcaacgccaacgcctactttggatacagcaccccctgggggtactttgactttaaccgcttccacagccactggagcccccgagactggcaaagactcatcaacaactactggggcttcagaccccggtccctcagagtcaaaatcttcaacattcaagtcaaagaggtcacggtgcaggactccaccaccaccatcgccaacaacctcacctccaccgtccaagtgtttacggacgacgactaccagctgccctacgtcgtcggcaacgggaccgagggatgcctgccggccttccctccgcaggtctttacgctgccgcagtacggttacgcgacgctgaaccgcgacaacacagaaaatcccaccgagaggagcagcttcttctgcctagagtactttcccagcaagatgctgagaacgggcaacaactttgagtttacctacaactttgaggaggtgcccttccactccagcttcgctcccttccagaacctcttcaagctggccaacccgctggtggaccagtacttgtaccgcttcgtgagcacaaataacactggcggagtccagttcaacaagaacctggccgggagatacgccaacacctacaaaaactggttcccggggcccatgggccgaacccagggctggaacctgggctccggggtcaaccgcgccagtgtcagcgccttcgccacgaccaataggatggagctcgagggcgcgagttaccaggtgcccccgcagccgaacggcatgaccaacaacctccagggcagcaacacctatgccctggagaacactatgatcttcaacagccagccggcgaacccgggcaccaccgccacgtacctcgagggcaacatgctcatcaccagcgagagcgagacgcagccggtgaaccgcgtggcgtacaacgtcggcgggcagatggccaccaacaaccagagctccaccactgcccccgcgaccggcacgtacaacctccaggaaatcgtgcccggcagcgtgtggatggagagggacgtgtacctccaaggacccatctgggccaagatcccagagacgggggcgcactttcacccctctccggccatgggcggattcggactcaaacacccaccgcccatgatgctcatcaagaacacgcctgtgcccggaaatatcaccagcttctcggacgtgcccgtcagcagcttcatcacccagtacagcaccgggcaggtcaccgtggagatggagtgggagctcaagaaggaaaactccaagaggtggaacccagagatccagtacacaaacaactacaacgacccccagtttgtggactttgccccggacagcaccggggaatacagaaccaccagacctatcggaacccgataccttacccgacccctttaa

SEQ ID NO: 208 - protein, 588 aa, synthetic construct
TAPTGKRIDDHFPKRKKARTEEDSKPSTSSDAEAGPSGSQQLQIPAQPASSLGADTMSAGGGGPLGDNNQGADGVGNASGDWHCDSTWMGDRVVTKSTRTWVLPSYNNHQYREIKSGSVDGSNANAYFGYSTPWGYFDFNRFHSHWSPRDWQRLINNYWGFRPRSLRVKIFNIQVKEVTVQDSTTTIANNLTSTVQVFTDDDYQLPYVVGNGTEGCLPAFPPQVFTLPQYGYATLNRDNTENPTERSSFFCLEYFPSKMLRTGNNFEFTYNFEEVPFHSSFAPFQNLFKLANPLVDQYLYRFVSTNNTGGVQFNKNLAGRYANTYKNWFPGPMGRTQGWNLGSGVNRASVSAFATTNRMELEGASYQVPPQPNGMTNNLQGSNTYALENTMIFNSQPANPGTTATYLEGNMLITSESETQPVNRVAYNVGGQMATNNQSSTTAPATGTYNLQEIVPGSVWMERDVYLQGPIWAKIPETGAHFHPSPAMGGFGLKHPPPMMLIKNTPVPGNITSFSDVPVSSFITQYSTGQVTVEMEWELKKENSKRWNPEIQYTNNYNDPQFVDFAPDSTGEYRTTRPIGTRYLTRPL

SEQ ID NO: 209 - DNA, 1599 bp, synthetic construct
  source 1..1599: mol_type = other DNA
atgtctgcgggaggtggcggcccattgggcgacaataaccaaggtgccgatggagtgggcaatgcctcgggagattggcattgcgattccacgtggatgggggacagagtcgtcaccaagtccacccgaacctgggtgctgcccagctacaacaaccaccagtaccgagagatcaaaagcggctccgtcgacggaagcaacgccaacgcctactttggatacagcaccccctgggggtactttgactttaaccgcttccacagccactggagcccccgagactggcaaagactcatcaacaactactggggcttcagaccccggtccctcagagtcaaaatcttcaacattcaagtcaaagaggtcacggtgcaggactccaccaccaccatcgccaacaacctcacctccaccgtccaagtgtttacggacgacgactaccagctgccctacgtcgtcggcaacgggaccgagggatgcctgccggccttccctccgcaggtctttacgctgccgcagtacggttacgcgacgctgaaccgcgacaacacagaaaatcccaccgagaggagcagcttcttctgcctagagtactttcccagcaagatgctgagaacgggcaacaactttgagtttacctacaactttgaggaggtgcccttccactccagcttcgctcccttccagaacctcttcaagctggccaacccgctggtggaccagtacttgtaccgcttcgtgagcacaaataacactggcggagtccagttcaacaagaacctggccgggagatacgccaacacctacaaaaactggttcccggggcccatgggccgaacccagggctggaacctgggctccggggtcaaccgcgccagtgtcagcgccttcgccacgaccaataggatggagctcgagggcgcgagttaccaggtgcccccgcagccgaacggcatgaccaacaacctccagggcagcaacacctatgccctggagaacactatgatcttcaacagccagccggcgaacccgggcaccaccgccacgtacctcgagggcaacatgctcatcaccagcgagagcgagacgcagccggtgaaccgcgtggcgtacaacgtcggcgggcagatggccaccaacaaccagagctccaccactgcccccgcgaccggcacgtacaacctccaggaaatcgtgcccggcagcgtgtggatggagagggacgtgtacctccaaggacccatctgggccaagatcccagagacgggggcgcactttcacccctctccggccatgggcggattcggactcaaacacccaccgcccatgatgctcatcaagaacacgcctgtgcccggaaatatcaccagcttctcggacgtgcccgtcagcagcttcatcacccagtacagcaccgggcaggtcaccgtggagatggagtgggagctcaagaaggaaaactccaagaggtggaacccagagatccagtacacaaacaactacaacgacccccagtttgtggactttgccccggacagcaccggggaatacagaaccaccagacctatcggaacccgataccttacccgacccctttaa

SEQ ID NO: 210 - protein, 532 aa, synthetic construct
MSAGGGGPLGDNNQGADGVGNASGDWHCDSTWMGDRVVTKSTRTWVLPSYNNHQYREIKSGSVDGSNANAYFGYSTPWGYFDFNRFHSHWSPRDWQRLINNYWGFRPRSLRVKIFNIQVKEVTVQDSTTTIANNLTSTVQVFTDDDYQLPYVVGNGTEGCLPAFPPQVFTLPQYGYATLNRDNTENPTERSSFFCLEYFPSKMLRTGNNFEFTYNFEEVPFHSSFAPFQNLFKLANPLVDQYLYRFVSTNNTGGVQFNKNLAGRYANTYKNWFPGPMGRTQGWNLGSGVNRASVSAFATTNRMELEGASYQVPPQPNGMTNNLQGSNTYALENTMIFNSQPANPGTTATYLEGNMLITSESETQPVNRVAYNVGGQMATNNQSSTTAPATGTYNLQEIVPGSVWMERDVYLQGPIWAKIPETGAHFHPSPAMGGFGLKHPPPMMLIKNTPVPGNITSFSDVPVSSFITQYSTGQVTVEMEWELKKENSKRWNPEIQYTNNYNDPQFVDFAPDSTGEYRTTRPIGTRYLTRPL

SEQ ID NO: 211 - DNA, 2175 bp, synthetic construct
  source 1..2175: mol_type = other DNA
atggcttttgttgatcaccctccagattggttggaagaagttggtgaaggtcttcgcgagtttttgggccttgaagcgggcccaccgaaaccaaaacccaatcagcagcatcaagatcaagcccgtggtcttgtgctgcctggttataactatctcggacccggaaacggtctcgatcgaggagagcctgtcaacagggcagacgaggtcgcgcgagagcacgacatctcgtacaacgagcagcttgaggcgggagacaacccctacctcaagtacaaccacgcggacgccgagtttcaggagaagctcgccgacgacacatccttcgggggaaacctcggaaaggcagtctttcaggccaagaaaagggttctcgaaccttttggcctggttgaagagggtgctaagacggcccctaccggaaagcggatagacgaccactttccaaaaagaaagaaggctcggaccgaagaggactccaagccttccacctcgtcagacgccgaagctggacccagcggatcccagcagctgcaaatcccagcccaaccagcctcaagtttgggagctgatacaatgtctgcgggaggtggcggcccattgggcgacaataaccaaggtgccgatggagtgggcaatgcctcgggagattggcattgcgattccacgtggatgggggacagagtcgtcaccaagtccacccgaacctgggtgctgcccagctacaacaaccaccagtaccgagagatcaaaagcggctccgtcgacggaagcaacgccaacgcctactttggatacagcaccccctgggggtactttgactttaaccgcttccacagccactggagcccccgagactggcaaagactcatcaacaactactggggcttcagaccccggtccctcagagtcaaaatcttcaacattcaagtcaaagaggtcacggtgcaggactccaccaccaccatcgccaacaacctcacctccaccgtccaagtgtttacggacgacgactaccagctgccctacgtcgtcggcaacgggaccgagggatgcctgccggccttccctccgcaggtctttacgctgccgcagtacggttacgcgacgctgaaccgcgacaacacagaaaatcccaccgagaggagcagcttcttctgcctagagtactttcccagcaagatgctgagaacgggcaacaactttgagtttacctacaactttgaggaggtgcccttccactccagcttcgctcccttccagaacctcttcaagctggccaacccgctggtggaccagtacttgtaccgcttcgtgagcacaaataacactggcggagtccagttcaacaagaacctggccgggagatacgccaacacctacaaaaactggttcccggggcccatgggccgaacccagggctggaacctgggctccggggtcaaccgcgccagtgtcagcgccttcgccacgaccaataggatggagctcgagggcgcgagttaccaggtgcccccgcagccgaacggcatgaccaacaacctccagggcagcaacacctatgccctggagaacactatgatcttcaacagccagccggcgaacccgggcaccaccgccacgtacctcgagggcaacatgctcatcaccagcgagagcgagacgcagccggtgaaccgcgtggcgtacaacgtcggcgggcagatggccaccaacaaccagagctccaccactgcccccgcgaccggcacgtacaacctccaggaaatcgtgcccggcagcgtgtggatggagagggacgtgtacctccaaggacccatctgggccaagatcccagagacgggggcgcactttcacccctctccggccatgggcggattcggactcaaacacccaccgcccatgatgctcatcaagaacacgcctgtgcccggaaatatcaccagcttctcggacgtgcccgtcagcagcttcatcacccagtacagcaccgggcaggtcaccgtggagatggagtgggagctcaagaaggaaaactccaagaggtggaacccagagatccagtacacaaacaactacaacgacccccagtttgtggactttgccccggacagcaccggggaatacagaagcaccagacctatcggaacccgataccttacccgacccctttaa

SEQ ID NO: 212 - protein, 724 aa, synthetic construct
MAFVDHPPDWLEEVGEGLREFLGLEAGPPKPKPNQQHQDQARGLVLPGYNYLGPGNGLDRGEPVNRADEVAREHDISYNEQLEAGDNPYLKYNHADAEFQEKLADDTSFGGNLGKAVFQAKKRVLEPFGLVEEGAKTAPTGKRIDDHFPKRKKARTEEDSKPSTSSDAEAGPSGSQQLQIPAQPASSLGADTMSAGGGGPLGDNNQGADGVGNASGDWHCDSTWMGDRVVTKSTRTWVLPSYNNHQYREIKSGSVDGSNANAYFGYSTPWGYFDFNRFHSHWSPRDWQRLINNYWGFRPRSLRVKIFNIQVKEVTVQDSTTTIANNLTSTVQVFTDDDYQLPYVVGNGTEGCLPAFPPQVFTLPQYGYATLNRDNTENPTERSSFFCLEYFPSKMLRTGNNFEFTYNFEEVPFHSSFAPFQNLFKLANPLVDQYLYRFVSTNNTGGVQFNKNLAGRYANTYKNWFPGPMGRTQGWNLGSGVNRASVSAFATTNRMELEGASYQVPPQPNGMTNNLQGSNTYALENTMIFNSQPANPGTTATYLEGNMLITSESETQPVNRVAYNVGGQMATNNQSSTTAPATGTYNLQEIVPGSVWMERDVYLQGPIWAKIPETGAHFHPSPAMGGFGLKHPPPMMLIKNTPVPGNITSFSDVPVSSFITQYSTGQVTVEMEWELKKENSKRWNPEIQYTNNYNDPQFVDFAPDSTGEYRSTRPIGTRYLTRPL

SEQ ID NO: 213 - DNA, 1767 bp, synthetic construct
  source 1..1767: mol_type = other DNA
acggcccctaccggaaagcggatagacgaccactttccaaaaagaaagaaggctcggaccgaagaggactccaagccttccacctcgtcagacgccgaagctggacccagcggatcccagcagctgcaaatcccagcccaaccagcctcaagtttgggagctgatacaatgtctgcgggaggtggcggcccattgggcgacaataaccaaggtgccgatggagtgggcaatgcctcgggagattggcattgcgattccacgtggatgggggacagagtcgtcaccaagtccacccgaacctgggtgctgcccagctacaacaaccaccagtaccgagagatcaaaagcggctccgtcgacggaagcaacgccaacgcctactttggatacagcaccccctgggggtactttgactttaaccgcttccacagccactggagcccccgagactggcaaagactcatcaacaactactggggcttcagaccccggtccctcagagtcaaaatcttcaacattcaagtcaaagaggtcacggtgcaggactccaccaccaccatcgccaacaacctcacctccaccgtccaagtgtttacggacgacgactaccagctgccctacgtcgtcggcaacgggaccgagggatgcctgccggccttccctccgcaggtctttacgctgccgcagtacggttacgcgacgctgaaccgcgacaacacagaaaatcccaccgagaggagcagcttcttctgcctagagtactttcccagcaagatgctgagaacgggcaacaactttgagtttacctacaactttgaggaggtgcccttccactccagcttcgctcccttccagaacctcttcaagctggccaacccgctggtggaccagtacttgtaccgcttcgtgagcacaaataacactggcggagtccagttcaacaagaacctggccgggagatacgccaacacctacaaaaactggttcccggggcccatgggccgaacccagggctggaacctgggctccggggtcaaccgcgccagtgtcagcgccttcgccacgaccaataggatggagctcgagggcgcgagttaccaggtgcccccgcagccgaacggcatgaccaacaacctccagggcagcaacacctatgccctggagaacactatgatcttcaacagccagccggcgaacccgggcaccaccgccacgtacctcgagggcaacatgctcatcaccagcgagagcgagacgcagccggtgaaccgcgtggcgtacaacgtcggcgggcagatggccaccaacaaccagagctccaccactgcccccgcgaccggcacgtacaacctccaggaaatcgtgcccggcagcgtgtggatggagagggacgtgtacctccaaggacccatctgggccaagatcccagagacgggggcgcactttcacccctctccggccatgggcggattcggactcaaacacccaccgcccatgatgctcatcaagaacacgcctgtgcccggaaatatcaccagcttctcggacgtgcccgtcagcagcttcatcacccagtacagcaccgggcaggtcaccgtggagatggagtgggagctcaagaaggaaaactccaagaggtggaacccagagatccagtacacaaacaactacaacgacccccagtttgtggactttgccccggacagcaccggggaatacagaagcaccagacctatcggaacccgataccttacccgacccctttaa

SEQ ID NO: 214 - protein, 588 aa, synthetic construct
TAPTGKRIDDHFPKRKKARTEEDSKPSTSSDAEAGPSGSQQLQIPAQPASSLGADTMSAGGGGPLGDNNQGADGVGNASGDWHCDSTWMGDRVVTKSTRTWVLPSYNNHQYREIKSGSVDGSNANAYFGYSTPWGYFDFNRFHSHWSPRDWQRLINNYWGFRPRSLRVKIFNIQVKEVTVQDSTTTIANNLTSTVQVFTDDDYQLPYVVGNGTEGCLPAFPPQVFTLPQYGYATLNRDNTENPTERSSFFCLEYFPSKMLRTGNNFEFTYNFEEVPFHSSFAPFQNLFKLANPLVDQYLYRFVSTNNTGGVQFNKNLAGRYANTYKNWFPGPMGRTQGWNLGSGVNRASVSAFATTNRMELEGASYQVPPQPNGMTNNLQGSNTYALENTMIFNSQPANPGTTATYLEGNMLITSESETQPVNRVAYNVGGQMATNNQSSTTAPATGTYNLQEIVPGSVWMERDVYLQGPIWAKIPETGAHFHPSPAMGGFGLKHPPPMMLIKNTPVPGNITSFSDVPVSSFITQYSTGQVTVEMEWELKKENSKRWNPEIQYTNNYNDPQFVDFAPDSTGEYRSTRPIGTRYLTRPL

SEQ ID NO: 215 - DNA, 1599 bp, synthetic construct
  source 1..1599: mol_type = other DNA
atgtctgcgggaggtggcggcccattgggcgacaataaccaaggtgccgatggagtgggcaatgcctcgggagattggcattgcgattccacgtggatgggggacagagtcgtcaccaagtccacccgaacctgggtgctgcccagctacaacaaccaccagtaccgagagatcaaaagcggctccgtcgacggaagcaacgccaacgcctactttggatacagcaccccctgggggtactttgactttaaccgcttccacagccactggagcccccgagactggcaaagactcatcaacaactactggggcttcagaccccggtccctcagagtcaaaatcttcaacattcaagtcaaagaggtcacggtgcaggactccaccaccaccatcgccaacaacctcacctccaccgtccaagtgtttacggacgacgactaccagctgccctacgtcgtcggcaacgggaccgagggatgcctgccggccttccctccgcaggtctttacgctgccgcagtacggttacgcgacgctgaaccgcgacaacacagaaaatcccaccgagaggagcagcttcttctgcctagagtactttcccagcaagatgctgagaacgggcaacaactttgagtttacctacaactttgaggaggtgcccttccactccagcttcgctcccttccagaacctcttcaagctggccaacccgctggtggaccagtacttgtaccgcttcgtgagcacaaataacactggcggagtccagttcaacaagaacctggccgggagatacgccaacacctacaaaaactggttcccggggcccatgggccgaacccagggctggaacctgggctccggggtcaaccgcgccagtgtcagcgccttcgccacgaccaataggatggagctcgagggcgcgagttaccaggtgcccccgcagccgaacggcatgaccaacaacctccagggcagcaacacctatgccctggagaacactatgatcttcaacagccagccggcgaacccgggcaccaccgccacgtacctcgagggcaacatgctcatcaccagcgagagcgagacgcagccggtgaaccgcgtggcgtacaacgtcggcgggcagatggccaccaacaaccagagctccaccactgcccccgcgaccggcacgtacaacctccaggaaatcgtgcccggcagcgtgtggatggagagggacgtgtacctccaaggacccatctgggccaagatcccagagacgggggcgcactttcacccctctccggccatgggcggattcggactcaaacacccaccgcccatgatgctcatcaagaacacgcctgtgcccggaaatatcaccagcttctcggacgtgcccgtcagcagcttcatcacccagtacagcaccgggcaggtcaccgtggagatggagtgggagctcaagaaggaaaactccaagaggtggaacccagagatccagtacacaaacaactacaacgacccccagtttgtggactttgccccggacagcaccggggaatacagaagcaccagacctatcggaacccgataccttacccgacccctttaa

SEQ ID NO: 216 - protein, 532 aa, synthetic construct
MSAGGGGPLGDNNQGADGVGNASGDWHCDSTWMGDRVVTKSTRTWVLPSYNNHQYREIKSGSVDGSNANAYFGYSTPWGYFDFNRFHSHWSPRDWQRLINNYWGFRPRSLRVKIFNIQVKEVTVQDSTTTIANNLTSTVQVFTDDDYQLPYVVGNGTEGCLPAFPPQVFTLPQYGYATLNRDNTENPTERSSFFCLEYFPSKMLRTGNNFEFTYNFEEVPFHSSFAPFQNLFKLANPLVDQYLYRFVSTNNTGGVQFNKNLAGRYANTYKNWFPGPMGRTQGWNLGSGVNRASVSAFATTNRMELEGASYQVPPQPNGMTNNLQGSNTYALENTMIFNSQPANPGTTATYLEGNMLITSESETQPVNRVAYNVGGQMATNNQSSTTAPATGTYNLQEIVPGSVWMERDVYLQGPIWAKIPETGAHFHPSPAMGGFGLKHPPPMMLIKNTPVPGNITSFSDVPVSSFITQYSTGQVTVEMEWELKKENSKRWNPEIQYTNNYNDPQFVDFAPDSTGEYRSTRPIGTRYLTRPL

SEQ ID NO: 217 - DNA, 2175 bp, synthetic construct
  source 1..2175: mol_type = other DNA
atgtcttttgttgatcaccctccagattggttggaagaagttggtgaaggtcttcgcgagtttttgggccttgaagcgggcccaccgaaaccaaaacccaatcagcagcatcaagatcaagcccgtggtcttgtgctgcctggttataactatctcggacccggaaacggtctcgatcgaggagagcctgtcaacagggcagacgaggtcgcgcgagagcacgacatctcgtacaacgagcagcttgaggcgggagacaacccctacctcaagtacaaccacgcggacgccgagtttcaggagaagctcgccgacgacacatccttcgggggaaacctcggaaaggcagtctttcaggccaagaaaagggttctcgaaccttttggcctggttgaagagggtgctaagacggcccctaccggaaagcggatagacgaccactttccaaaaagaaagaaggctcggaccgaagaggactccaagccttccacctcgtcagacgccgaagctggacccagcggatcccagcagctgcaaatcccagcccaaccagcctcaagtttgggagctgatacaatgtctgcgggaggtggcggcccattgggcgacaataaccaaggtgccgatggagtgggcaatgcctcgggagattggcattgcgattccacgtggatgggggacagagtcgtcaccaagtccacccgaacctgggtgctgcccagctacaacaaccaccagtaccgagagatcaaaagcggctccgtcgacggaagcaacgccaacgcctactttggatacagcaccccctgggggtactttgactttaaccgcttccacagccactggagcccccgagactggcaaagactcatcaacaactactggggcttcagaccccggtccctcagagtcaaaatcttcaacattcaagtcaaagaggtcacggtgcaggactccaccaccaccatcgccaacaacctcacctccaccgtccaagtgtttacggacgacgactaccagctgccctacgtcgtcggcaacgggaccgagggatgcctgccggccttccctccgcaggtctttacgctgccgcagtacggttacgcgacgctgaaccgcgacaacacagaaaatcccaccgagaggagcagcttcttctgcctagagtactttcccagcaagatgctgagaacgggcaacaactttgagtttacctacaactttgaggaggtgcccttccactccagcttcgctcccagtcagaacctcttcaagctggccaacccgctggtggaccagtacttgtaccgcttcgtgagcacaaataacactggcggagtccagttcaacaagaacctggccgggagatacgccaacacctacaaaaactggttcccggggcccatgggccgaacccagggctggaacctgggctccggggtcaaccgcgccagtgtcagcgccttcgccacgaccaataggatggagctcgagggcgcgagttaccaggtgcccccgcagccgaacggcatgaccaacaacctccagggcagcaacacctatgccctggagaacactatgatcttcaacagccagccggcgaacccgggcaccaccgccacgtacctcgagggcaacatgctcatcaccagcgagagcgagacgcagccggtgaaccgcgtggcgtacaacgtcggcgggcagatggccaccaacaaccagagctccaccactgcccccgcgaccggcacgtacaacctccaggaaatcgtgcccggcagcgtgtggatggagagggacgtgtacctccaaggacccatctgggccaagatcccagagacgggggcgcactttcacccctctccggccatgggcggattcggactcaaacacccaccgcccatgatgctcatcaagaacacgcctgtgcccggaaatatcaccagcttctcggacgtgcccgtcagcagcttcatcacccagtacagcaccgggcaggtcaccgtggagatggagtgggagctcaagaaggaaaacgccaagaggtggaacccagagatccagtacacaaacaactacaacgacccccagtttgtggactttgccccggacagcaccggggaatacagaaccaccagacctatcggaacccgataccttacccgacccctttaa

SEQ ID NO: 218 - protein, 588 aa, synthetic construct
TAPTGKRIDDHFPKRKKARTEEDSKPSTSSDAEAGPSGSQQLQIPAQPASSLGADTMSAGGGGPLGDNNQGADGVGNASGDWHCDSTWMGDRVVTKSTRTWVLPSYNNHQYREIKSGSVDGSNANAYFGYSTPWGYFDFNRFHSHWSPRDWQRLINNYWGFRPRSLRVKIFNIQVKEVTVQDSTTTIANNLTSTVQVFTDDDYQLPYVVGNGTEGCLPAFPPQVFTLPQYGYATLNRDNTENPTERSSFFCLEYFPSKMLRTGNNFEFTYNFEEVPFHSSFAPSQNLFKLANPLVDQYLYRFVSTNNTGGVQFNKNLAGRYANTYKNWFPGPMGRTQGWNLGSGVNRASVSAFATTNRMELEGASYQVPPQPNGMTNNLQGSNTYALENTMIFNSQPANPGTTATYLEGNMLITSESETQPVNRVAYNVGGQMATNNQSSTTAPATGTYNLQEIVPGSVWMERDVYLQGPIWAKIPETGAHFHPSPAMGGFGLKHPPPMMLIKNTPVPGNITSFSDVPVSSFITQYSTGQVTVEMEWELKKENAKRWNPEIQYTNNYNDPQFVDFAPDSTGEYRTTRPIGTRYLTRPL

SEQ ID NO: 219 - DNA, 1767 bp, synthetic construct
  source 1..1767: mol_type = other DNA
acggcccctaccggaaagcggatagacgaccactttccaaaaagaaagaaggctcggaccgaagaggactccaagccttccacctcgtcagacgccgaagctggacccagcggatcccagcagctgcaaatcccagcccaaccagcctcaagtttgggagctgatacaatgtctgcgggaggtggcggcccattgggcgacaataaccaaggtgccgatggagtgggcaatgcctcgggagattggcattgcgattccacgtggatgggggacagagtcgtcaccaagtccacccgaacctgggtgctgcccagctacaacaaccaccagtaccgagagatcaaaagcggctccgtcgacggaagcaacgccaacgcctactttggatacagcaccccctgggggtactttgactttaaccgcttccacagccactggagcccccgagactggcaaagactcatcaacaactactggggcttcagaccccggtccctcagagtcaaaatcttcaacattcaagtcaaagaggtcacggtgcaggactccaccaccaccatcgccaacaacctcacctccaccgtccaagtgtttacggacgacgactaccagctgccctacgtcgtcggcaacgggaccgagggatgcctgccggccttccctccgcaggtctttacgctgccgcagtacggttacgcgacgctgaaccgcgacaacacagaaaatcccaccgagaggagcagcttcttctgcctagagtactttcccagcaagatgctgagaacgggcaacaactttgagtttacctacaactttgaggaggtgcccttccactccagcttcgctcccagtcagaacctcttcaagctggccaacccgctggtggaccagtacttgtaccgcttcgtgagcacaaataacactggcggagtccagttcaacaagaacctggccgggagatacgccaacacctacaaaaactggttcccggggcccatgggccgaacccagggctggaacctgggctccggggtcaaccgcgccagtgtcagcgccttcgccacgaccaataggatggagctcgagggcgcgagttaccaggtgcccccgcagccgaacggcatgaccaacaacctccagggcagcaacacctatgccctggagaacactatgatcttcaacagccagccggcgaacccgggcaccaccgccacgtacctcgagggcaacatgctcatcaccagcgagagcgagacgcagccggtgaaccgcgtggcgtacaacgtcggcgggcagatggccaccaacaaccagagctccaccactgcccccgcgaccggcacgtacaacctccaggaaatcgtgcccggcagcgtgtggatggagagggacgtgtacctccaaggacccatctgggccaagatcccagagacgggggcgcactttcacccctctccggccatgggcggattcggactcaaacacccaccgcccatgatgctcatcaagaacacgcctgtgcccggaaatatcaccagcttctcggacgtgcccgtcagcagcttcatcacccagtacagcaccgggcaggtcaccgtggagatggagtgggagctcaagaaggaaaacgccaagaggtggaacccagagatccagtacacaaacaactacaacgacccccagtttgtggactttgccccggacagcaccggggaatacagaaccaccagacctatcggaacccgataccttacccgacccctttaa

SEQ ID NO: 220 - protein, 588 aa, synthetic construct; identical to SEQ ID NO: 218

SEQ ID NO: 221 - DNA, 1599 bp, synthetic construct
  source 1..1599: mol_type = other DNA
atgtctgcgggaggtggcggcccattgggcgacaataaccaaggtgccgatggagtgggcaatgcctcgggagattggcattgcgattccacgtggatgggggacagagtcgtcaccaagtccacccgaacctgggtgctgcccagctacaacaaccaccagtaccgagagatcaaaagcggctccgtcgacggaagcaacgccaacgcctactttggatacagcaccccctgggggtactttgactttaaccgcttccacagccactggagcccccgagactggcaaagactcatcaacaactactggggcttcagaccccggtccctcagagtcaaaatcttcaacattcaagtcaaagaggtcacggtgcaggactccaccaccaccatcgccaacaacctcacctccaccgtccaagtgtttacggacgacgactaccagctgccctacgtcgtcggcaacgggaccgagggatgcctgccggccttccctccgcaggtctttacgctgccgcagtacggttacgcgacgctgaaccgcgacaacacagaaaatcccaccgagaggagcagcttcttctgcctagagtactttcccagcaagatgctgagaacgggcaacaactttgagtttacctacaactttgaggaggtgcccttccactccagcttcgctcccagtcagaacctcttcaagctggccaacccgctggtggaccagtacttgtaccgcttcgtgagcacaaataacactggcggagtccagttcaacaagaacctggccgggagatacgccaacacctacaaaaactggttcccggggcccatgggccgaacccagggctggaacctgggctccggggtcaaccgcgccagtgtcagcgccttcgccacgaccaataggatggagctcgagggcgcgagttaccaggtgcccccgcagccgaacggcatgaccaacaacctccagggcagcaacacctatgccctggagaacactatgatcttcaacagccagccggcgaacccgggcaccaccgccacgtacctcgagggcaacatgctcatcaccagcgagagcgagacgcagccggtgaaccgcgtggcgtacaacgtcggcgggcagatggccaccaacaaccagagctccaccactgcccccgcgaccggcacgtacaacctccaggaaatcgtgcccggcagcgtgtggatggagagggacgtgtacctccaaggacccatctgggccaagatcccagagacgggggcgcactttcacccctctccggccatgggcggattcggactcaaacacccaccgcccatgatgctcatcaagaacacgcctgtgcccggaaatatcaccagcttctcggacgtgcccgtcagcagcttcatcacccagtacagcaccgggcaggtcaccgtggagatggagtgggagctcaagaaggaaaacgccaagaggtggaacccagagatccagtacacaaacaactacaacgacccccagtttgtggactttgccccggacagcaccggggaatacagaaccaccagacctatcggaacccgataccttacccgacccctttaa

SEQ ID NO: 222 - protein, 532 aa, synthetic construct
MSAGGGGPLGDNNQGADGVGNASGDWHCDSTWMGDRVVTKSTRTWVLPSYNNHQYREIKSGSVDGSNANAYFGYSTPWGYFDFNRFHSHWSPRDWQRLINNYWGFRPRSLRVKIFNIQVKEVTVQDSTTTIANNLTSTVQVFTDDDYQLPYVVGNGTEGCLPAFPPQVFTLPQYGYATLNRDNTENPTERSSFFCLEYFPSKMLRTGNNFEFTYNFEEVPFHSSFAPSQNLFKLANPLVDQYLYRFVSTNNTGGVQFNKNLAGRYANTYKNWFPGPMGRTQGWNLGSGVNRASVSAFATTNRMELEGASYQVPPQPNGMTNNLQGSNTYALENTMIFNSQPANPGTTATYLEGNMLITSESETQPVNRVAYNVGGQMATNNQSSTTAPATGTYNLQEIVPGSVWMERDVYLQGPIWAKIPETGAHFHPSPAMGGFGLKHPPPMMLIKNTPVPGNITSFSDVPVSSFITQYSTGQVTVEMEWELKKENAKRWNPEIQYTNNYNDPQFVDFAPDSTGEYRTTRPIGTRYLTRPL

SEQ ID NO: 223 - DNA, 2175 bp, synthetic construct
  source 1..2175: mol_type = other DNA
atggcttttgttgatcaccctccagattggttggaagaagttggtgaaggtcttcgcgagtttttgggccttgaagcgggcccaccgaaaccaaaacccaatcagcagcatcaagatcaagcccgtggtcttgtgctgcctggttataactatctcggacccggaaacggtctcgatcgaggagagcctgtcaacagggcagacgaggtcgcgcgagagcacgacatctcgtacaacgagcagcttgaggcgggagacaacccctacctcaagtacaaccacgcggacgccgagtttcaggagaagctcgccgacgacacatccttcgggggaaacctcggaaaggcagtctttcaggccaagaaaagggttctcgaaccttttggcctggttgaagagggtgctaagacggcccctaccggaaagcggatagacgaccactttccaaaaagaaagaaggctcggaccgaagaggactccaagccttccacctcgtcagacgccgaagctggacccagcggatcccagcagctgcaaatcccagcccaaccagcctcaagtttgggagctgatacaatgtctgcgggaggtggcggcccattgggcgacaataaccaaggtgccgatggagtgggcaatgcctcgggagattggcattgcgattccacgtggatgggggacagagtcgtcaccaagtccacccgaacctgggtgctgcccagctacaacaaccaccagtaccgagagatcaaaagcggctccgtcgacggaagcaacgccaacgcctactttggatacagcaccccctgggggtactttgactttaaccgcttccacagccactggagcccccgagactggcaaagactcatcaacaactactggggcttcagaccccggtccctcagagtcaaaatcttcaacattcaagtcaaagaggtcacggtgcaggactccaccaccaccatcgccaacaacctcacctccaccgtccaagtgtttacggacgacgactaccagctgccctacgtcgtcggcaacgggaccgagggatgcctgccggccttccctccgcaggtctttacgctgccgcagtacggttacgcgacgctgaaccgcgacaacacagaaaatcccaccgagaggagcagcttcttctgcctagagtactttcccagcaagatgctgagaacgggcaacaactttgagtttacctacaactttgaggaggtgcccttccactccagcttcgctcccagtcagaacctcttcaagctggccaacccgctggtggaccagtacttgtaccgcttcgtgagcacaaataacactggcggagtccagttcaacaagaacctggccgggagatacgccaacacctacaaaaactggttcccggggcccatgggccgaacccagggctggaacctgggctccggggtcaaccgcgccagtgtcagcgccttcgccacgaccaataggatggagctcgagggcgcgagttaccaggtgcccccgcagccgaacggcatgaccaacaacctccagggcagcaacacctatgccctggagaacactatgatcttcaacagccagccggcgaacccgggcaccaccgccacgtacctcgagggcaacatgctcatcaccagcgagagcgagacgcagccggtgaaccgcgtggcgtacaacgtcggcgggcagatggccaccaacaaccagagctccaccactgcccccgcgaccggcacgtacaacctccaggaaatcgtgcccggcagcgtgtggatggagagggacgtgtacctccaaggacccatctgggccaagatcccagagacgggggcgcactttcacccctctccggccatgggcggattcggactcaaacacccaccgcccatgatgctcatcaagaacacgcctgtgcccggaaatatcaccagcttctcggacgtgcccgtcagcagcttcatcacccagtacagcaccgggcaggtcaccgtggagatggagtgggagctcaagaaggaaaacgccaagaggtggaacccagagatccagtacacaaacaactacaacgacccccagtttgtggactttgccccggacagcaccggggaatacagaagcaccagacctatcggaacccgataccttacccgacccctttaa

SEQ ID NO: 224 - protein, 724 aa, synthetic construct
MAFVDHPPDWLEEVGEGLREFLGLEAGPPKPKPNQQHQDQARGLVLPGYNYLGPGNGLDRGEPVNRADEVAREHDISYNEQLEAGDNPYLKYNHADAEFQEKLADDTSFGGNLGKAVFQAKKRVLEPFGLVEEGAKTAPTGKRIDDHFPKRKKARTEEDSKPSTSSDAEAGPSGSQQLQIPAQPASSLGADTMSAGGGGPLGDNNQGADGVGNASGDWHCDSTWMGDRVVTKSTRTWVLPSYNNHQYREIKSGSVDGSNANAYFGYSTPWGYFDFNRFHSHWSPRDWQRLINNYWGFRPRSLRVKIFNIQVKEVTVQDSTTTIANNLTSTVQVFTDDDYQLPYVVGNGTEGCLPAFPPQVFTLPQYGYATLNRDNTENPTERSSFFCLEYFPSKMLRTGNNFEFTYNFEEVPFHSSFAPSQNLFKLANPLVDQYLYRFVSTNNTGGVQFNKNLAGRYANTYKNWFPGPMGRTQGWNLGSGVNRASVSAFATTNRMELEGASYQVPPQPNGMTNNLQGSNTYALENTMIFNSQPANPGTTATYLEGNMLITSESETQPVNRVAYNVGGQMATNNQSSTTAPATGTYNLQEIVPGSVWMERDVYLQGPIWAKIPETGAHFHPSPAMGGFGLKHPPPMMLIKNTPVPGNITSFSDVPVSSFITQYSTGQVTVEMEWELKKENAKRWNPEIQYTNNYNDPQFVDFAPDSTGEYRSTRPIGTRYLTRPL

SEQ ID NO: 225 - DNA, 1767 bp, synthetic construct
  source 1..1767: mol_type = other DNA
acggcccctaccggaaagcggatagacgaccactttccaaaaagaaagaaggctcggaccgaagaggactccaagccttccacctcgtcagacgccgaagctggacccagcggatcccagcagctgcaaatcccagcccaaccagcctcaagtttgggagctgatacaatgtctgcgggaggtggcggcccattgggcgacaataaccaaggtgccgatggagtgggcaatgcctcgggagattggcattgcgattccacgtggatgggggacagagtcgtcaccaagtccacccgaacctgggtgctgcccagctacaacaaccaccagtaccgagagatcaaaagcggctccgtcgacggaagcaacgccaacgcctactttggatacagcaccccctgggggtactttgactttaaccgcttccacagccactggagcccccgagactggcaaagactcatcaacaactactggggcttcagaccccggtccctcagagtcaaaatcttcaacattcaagtcaaagaggtcacggtgcaggactccaccaccaccatcgccaacaacctcacctccaccgtccaagtgtttacggacgacgactaccagctgccctacgtcgtcggcaacgggaccgagggatgcctgccggccttccctccgcaggtctttacgctgccgcagtacggttacgcgacgctgaaccgcgacaacacagaaaatcccaccgagaggagcagcttcttctgcctagagtactttcccagcaagatgctgagaacgggcaacaactttgagtttacctacaactttgaggaggtgcccttccactccagcttcgctcccagtcagaacctcttcaagctggccaacccgctggtggaccagtacttgtaccgcttcgtgagcacaaataacactggcggagtccagttcaacaagaacctggccgggagatacgccaacacctacaaaaactggttcccggggcccatgggccgaacccagggctggaacctgggctccggggtcaaccgcgccagtgtcagcgccttcgccacgaccaataggatggagctcgagggcgcgagttaccaggtgcccccgcagccgaacggcatgaccaacaacctccagggcagcaacacctatgccctggagaacactatgatcttcaacagccagccggcgaacccgggcaccaccgccacgtacctcgagggcaacatgctcatcaccagcgagagcgagacgcagccggtgaaccgcgtggcgtacaacgtcggcgggcagatggccaccaacaaccagagctccaccactgcccccgcgaccggcacgtacaacctccaggaaatcgtgcccggcagcgtgtggatggagagggacgtgtacctccaaggacccatctgggccaagatcccagagacgggggcgcactttcacccctctccggccatgggcggattcggactcaaacacccaccgcccatgatgctcatcaagaacacgcctgtgcccggaaatatcaccagcttctcggacgtgcccgtcagcagcttcatcacccagtacagcaccgggcaggtcaccgtggagatggagtgggagctcaagaaggaaaacgccaagaggtggaacccagagatccagtacacaaacaactacaacgacccccagtttgtggactttgccccggacagcaccggggaatacagaagcaccagacctatcggaacccgataccttacccgacccctttaa

SEQ ID NO: 226 - protein, 588 aa, synthetic construct
TAPTGKRIDDHFPKRKKARTEEDSKPSTSSDAEAGPSGSQQLQIPAQPASSLGADTMSAGGGGPLGDNNQGADGVGNASGDWHCDSTWMGDRVVTKSTRTWVLPSYNNHQYREIKSGSVDGSNANAYFGYSTPWGYFDFNRFHSHWSPRDWQRLINNYWGFRPRSLRVKIFNIQVKEVTVQDSTTTIANNLTSTVQVFTDDDYQLPYVVGNGTEGCLPAFPPQVFTLPQYGYATLNRDNTENPTERSSFFCLEYFPSKMLRTGNNFEFTYNFEEVPFHSSFAPSQNLFKLANPLVDQYLYRFVSTNNTGGVQFNKNLAGRYANTYKNWFPGPMGRTQGWNLGSGVNRASVSAFATTNRMELEGASYQVPPQPNGMTNNLQGSNTYALENTMIFNSQPANPGTTATYLEGNMLITSESETQPVNRVAYNVGGQMATNNQSSTTAPATGTYNLQEIVPGSVWMERDVYLQGPIWAKIPETGAHFHPSPAMGGFGLKHPPPMMLIKNTPVPGNITSFSDVPVSSFITQYSTGQVTVEMEWELKKENAKRWNPEIQYTNNYNDPQFVDFAPDSTGEYRSTRPIGTRYLTRPL

SEQ ID NO: 227 - DNA, 1599 bp, synthetic construct
  source 1..1599: mol_type = other DNA
atgtctgcgggaggtggcggcccattgggcgacaataaccaaggtgccgatggagtgggcaatgcctcgggagattggcattgcgattccacgtggatgggggacagagtcgtcaccaagtccacccgaacctgggtgctgcccagctacaacaaccaccagtaccgagagatcaaaagcggctccgtcgacggaagcaacgccaacgcctactttggatacagcaccccctgggggtactttgactttaaccgcttccacagccactggagcccccgagactggcaaagactcatcaacaactactggggcttcagaccccggtccctcagagtcaaaatcttcaacattcaagtcaaagaggtcacggtgcaggactccaccaccaccatcgccaacaacctcacctccaccgtccaagtgtttacggacgacgactaccagctgccctacgtcgtcggcaacgggaccgagggatgcctgccggccttccctccgcaggtctttacgctgccgcagtacggttacgcgacgctgaaccgcgacaacacagaaaatcccaccgagaggagcagcttcttctgcctagagtactttcccagcaagatgctgagaacgggcaacaactttgagtttacctacaactttgaggaggtgcccttccactccagcttcgctcccagtcagaacctcttcaagctggccaacccgctggtggaccagtacttgtaccgcttcgtgagcacaaataacactggcggagtccagttcaacaagaacctggccgggagatacgccaacacctacaaaaactggttcccggggcccatgggccgaacccagggctggaacctgggctccggggtcaaccgcgccagtgtcagcgccttcgccacgaccaataggatggagctcgagggcgcgagttaccaggtgcccccgcagccgaacggcatgaccaacaacctccagggcagcaacacctatgccctggagaacactatgatcttcaacagccagccggcgaacccgggcaccaccgccacgtacctcgagggcaacatgctcatcaccagcgagagcgagacgcagccggtgaaccgcgtggcgtacaacgtcggcgggcagatggccaccaacaaccagagctccaccactgcccccgcgaccggcacgtacaacctccaggaaatcgtgcccggcagcgtgtggatggagagggacgtgtacctccaaggacccatctgggccaagatcccagagacgggggcgcactttcacccctctccggccatgggcggattcggactcaaacacccaccgcccatgatgctcatcaagaacacgcctgtgcccggaaatatcaccagcttctcggacgtgcccgtcagcagcttcatcacccagtacagcaccgggcaggtcaccgtggagatggagtgggagctcaagaaggaaaacgccaagaggtggaacccagagatccagtacacaaacaactacaacgacccccagtttgtggactttgccccggacagcaccggggaatacagaagcaccagacctatcggaacccgataccttacccgacccctttaa

SEQ ID NO: 228 - protein, 532 aa, synthetic construct
MSAGGGGPLGDNNQGADGVGNASGDWHCDSTWMGDRVVTKSTRTWVLPSYNNHQYREIKSGSVDGSNANAYFGYSTPWGYFDFNRFHSHWSPRDWQRLINNYWGFRPRSLRVKIFNIQVKEVTVQDSTTTIANNLTSTVQVFTDDDYQLPYVVGNGTEGCLPAFPPQVFTLPQYGYATLNRDNTENPTERSSFFCLEYFPSKMLRTGNNFEFTYNFEEVPFHSSFAPSQNLFKLANPLVDQYLYRFVSTNNTGGVQFNKNLAGRYANTYKNWFPGPMGRTQGWNLGSGVNRASVSAFATTNRMELEGASYQVPPQPNGMTNNLQGSNTYALENTMIFNSQPANPGTTATYLEGNMLITSESETQPVNRVAYNVGGQMATNNQSSTTAPATGTYNLQEIVPGSVWMERDVYLQGPIWAKIPETGAHFHPSPAMGGFGLKHPPPMMLIKNTPVPGNITSFSDVPVSSFITQYSTGQVTVEMEWELKKENAKRWNPEIQYTNNYNDPQFVDFAPDSTGEYRSTRPIGTRYLTRPL

SEQ ID NO: 229 - DNA, 2175 bp, synthetic construct
  source 1..2175: mol_type = other DNA
atgtcttttgttgatcaccctccagattggttggaagaagttggtgaaggtcttcgcgagtttttgggccttgaagcgggcccaccgaaaccaaaacccaatcagcagcatcaagatcaagcccgtggtcttgtgctgcctggttataactatctcggacccggaaacggtctcgatcgaggagagcctgtcaacagggcagacgaggtcgcgcgagagcacgacatctcgtacaacgagcagcttgaggcgggagacaacccctacctcaagtacaaccacgcggacgccgagtttcaggagaagctcgccgacgacacatccttcgggggaaacctcggaaaggcagtctttcaggccaagaaaagggttctcgaaccttttggcctggttgaagagggtgctaagacggcccctaccggaaagcggatagacgaccactttccaaaaagaaagaaggctcggaccgaagaggactccaagccttccacctcgtcagacgccgaagctggacccagcggatcccagcagctgcaaatcccagcccaaccagcctcaagtttgggagctgatacaatgtctgcgggaggtggcggcccattgggcgacaataaccaaggtgccgatggagtgggcaatgcctcgggagattggcattgcgattccacgtggatgggggacagagtcgtcaccaagtccacccgaacctgggtgctgcccagctacaacaaccaccagtaccgagagatcaaaagcggctccgtcgacggaagcaacgccaacgcctactttggatacagcaccccctgggggtactttgactttaaccgcttccacagccactggagcccccgagactggcaaagactcatcaacaactactggggcttcagaccccggtccctcagagtcaaaatcttcaacattcaagtcaaagaggtcacggtgcaggactccaccaccaccatcgccaacaacctcacctccaccgtccaagtgtttacggacgacgactaccagctgccctacgtcgtcggcaacgggaccgagggatgcctgccggccttccctccgcaggtctttacgctgccgcagtacggttacgcgacgctgaaccgcgacaacacagaaaatcccaccgagaggagcagcttcttctgcctagagtactttcccagcaagatgctgagaacgggcaacaactttgagtttacctacaactttgaggaggtgcccttccactccagcttcgctcccagtcagaacctcttcaagctggccaacccgctggtggaccagtacttgtaccgcttcgtgagcacaaataacactggcggagtccagttcaacaagaacctggccgggagatacgccaacacctacaaaaactggttcccggggcccatgggccgaacccagggctggaacctgggctccggggtcaaccgcgccagtgtcagcgccttcgccacgaccaataggatggagctcgagggcgcgagttaccaggtgcccccgcagccgaacggcatgaccaacaacctccagggcagcaacacctatgccctggagaacactatgatcttcaacagccagccggcgaacccgggcaccaccgccacgtacctcgagggcaacatgctcatcaccagcgagagcgagacgcagccggtgaaccgcgtggcgtacaacgtcggcgggcagatggccaccaacaaccagagctccaccactgcccccgcgaccggcacgtacaacctccaggaaatcgtgcccggcagcgtgtggatggagagggacgtgtacctccaaggacccatctgggccaagatcccagagacgggggcgcactttcacccctctccggccatgggcggattcggactcaaacacccaccgcccatgatgctcatcaagaacacgcctgtgcccggaaatatcaccagcttctcggacgtgcccgtcagcagcttcatcacccagtacagcaccgggcaggtcaccgtggagatggagtgggagctcaagaaggaaaactccaagaggtggaacccagagatccagtacacaaacaactacaacgacccccagtttgtggactttgccccggacagcaccggggaatacagaaccaccagacctatcggaacccgataccttgtgcgacccctttaa

SEQ ID NO: 230 - protein, 724 aa, synthetic construct
MSFVDHPPDWLEEVGEGLREFLGLEAGPPKPKPNQQHQDQARGLVLPGYNYLGPGNGLDRGEPVNRADEVAREHDISYNEQLEAGDNPYLKYNHADAEFQEKLADDTSFGGNLGKAVFQAKKRVLEPFGLVEEGAKTAPTGKRIDDHFPKRKKARTEEDSKPSTSSDAEAGPSGSQQLQIPAQPASSLGADTMSAGGGGPLGDNNQGADGVGNASGDWHCDSTWMGDRVVTKSTRTWVLPSYNNHQYREIKSGSVDGSNANAYFGYSTPWGYFDFNRFHSHWSPRDWQRLINNYWGFRPRSLRVKIFNIQVKEVTVQDSTTTIANNLTSTVQVFTDDDYQLPYVVGNGTEGCLPAFPPQVFTLPQYGYATLNRDNTENPTERSSFFCLEYFPSKMLRTGNNFEFTYNFEEVPFHSSFAPSQNLFKLANPLVDQYLYRFVSTNNTGGVQFNKNLAGRYANTYKNWFPGPMGRTQGWNLGSGVNRASVSAFATTNRMELEGASYQVPPQPNGMTNNLQGSNTYALENTMIFNSQPANPGTTATYLEGNMLITSESETQPVNRVAYNVGGQMATNNQSSTTAPATGTYNLQEIVPGSVWMERDVYLQGPIWAKIPETGAHFHPSPAMGGFGLKHPPPMMLIKNTPVPGNITSFSDVPVSSFITQYSTGQVTVEMEWELKKENSKRWNPEIQYTNNYNDPQFVDFAPDSTGEYRTTRPIGTRYLVRPL

SEQ ID NO: 231 - DNA, 1767 bp, synthetic construct
  source 1..1767: mol_type = other DNA
acggcccctaccggaaagcggatagacgaccactttccaaaaagaaagaaggctcggaccgaagaggactccaagccttccacctcgtcagacgccgaagctggacccagcggatcccagcagctgcaaatcccagcccaaccagcctcaagtttgggagctgatacaatgtctgcgggaggtggcggcccattgggcgacaataaccaaggtgccgatggagtgggcaatgcctcgggagattggcattgcgattccacgtggatgggggacagagtcgtcaccaagtccacccgaacctgggtgctgcccagctacaacaaccaccagtaccgagagatcaaaagcggctccgtcgacggaagcaacgccaacgcctactttggatacagcaccccctgggggtactttgactttaaccgcttccacagccactggagcccccgagactggcaaagactcatcaacaactactggggcttcagaccccggtccctcagagtcaaaatcttcaacattcaagtcaaagaggtcacggtgcaggactccaccaccaccatcgccaacaacctcacctccaccgtccaagtgtttacggacgacgactaccagctgccctacgtcgtcggcaacgggaccgagggatgcctgccggccttccctccgcaggtctttacgctgccgcagtacggttacgcgacgctgaaccgcgacaacacagaaaatcccaccgagaggagcagcttcttctgcctagagtactttcccagcaagatgctgagaacgggcaacaactttgagtttacctacaactttgaggaggtgcccttccactccagcttcgctcccagtcagaacctcttcaagctggccaacccgctggtggaccagtacttgtaccgcttcgtgagcacaaataacactggcggagtccagttcaacaagaacctggccgggagatacgccaacacctacaaaaactggttcccggggcccatgggccgaacccagggctggaacctgggctccggggtcaaccgcgccagtgtcagcgccttcgccacgaccaataggatggagctcgagggcgcgagttaccaggtgcccccgcagccgaacggcatgaccaacaacctccagggcagcaacacctatgccctggagaacactatgatcttcaacagccagccggcgaacccgggcaccaccgccacgtacctcgagggcaacatgctcatcaccagcgagagcgagacgcagccggtgaaccgcgtggcgtacaacgtcggcgggcagatggccaccaacaaccagagctccaccactgcccccgcgaccggcacgtacaacctccaggaaatcgtgcccggcagcgtgtggatggagagggacgtgtacctccaaggacccatctgggccaagatcccagagacgggggcgcactttcacccctctccggccatgggcggattcggactcaaacacccaccgcccatgatgctcatcaagaacacgcctgtgcccggaaatatcaccagcttctcggacgtgcccgtcagcagcttcatcacccagtacagcaccgggcaggtcaccgtggagatggagtgggagctcaagaaggaaaactccaagaggtggaacccagagatccagtacacaaacaactacaacgacccccagtttgtggactttgccccggacagcaccggggaatacagaaccaccagacctatcggaacccgataccttgtgcgacccctttaa

SEQ ID NO: 232 - protein, 588 aa, synthetic construct
TAPTGKRIDDHFPKRKKARTEEDSKPSTSSDAEAGPSGSQQLQIPAQPASSLGADTMSAGGGGPLGDNNQGADGVGNASGDWHCDSTWMGDRVVTKSTRTWVLPSYNNHQYREIKSGSVDGSNANAYFGYSTPWGYFDFNRFHSHWSPRDWQRLINNYWGFRPRSLRVKIFNIQVKEVTVQDSTTTIANNLTSTVQVFTDDDYQLPYVVGNGTEGCLPAFPPQVFTLPQYGYATLNRDNTENPTERSSFFCLEYFPSKMLRTGNNFEFTYNFEEVPFHSSFAPSQNLFKLANPLVDQYLYRFVSTNNTGGVQFNKNLAGRYANTYKNWFPGPMGRTQGWNLGSGVNRASVSAFATTNRMELEGASYQVPPQPNGMTNNLQGSNTYALENTMIFNSQPANPGTTATYLEGNMLITSESETQPVNRVAYNVGGQMATNNQSSTTAPATGTYNLQEIVPGSVWMERDVYLQGPIWAKIPETGAHFHPSPAMGGFGLKHPPPMMLIKNTPVPGNITSFSDVPVSSFITQYSTGQVTVEMEWELKKENSKRWNPEIQYTNNYNDPQFVDFAPDSTGEYRTTRPIGTRYLVRPL

SEQ ID NO: 233 - DNA, 1599 bp, synthetic construct
  source 1..1599: mol_type = other DNA
atgtctgcgggaggtggcggcccattgggcgacaataaccaaggtgccgatggagtgggcaatgcctcgggagattggcattgcgattccacgtggatgggggacagagtcgtcaccaagtccacccgaacctgggtgctgcccagctacaacaaccaccagtaccgagagatcaaaagcggctccgtcgacggaagcaacgccaacgcctactttggatacagcaccccctgggggtactttgactttaaccgcttccacagccactggagcccccgagactggcaaagactcatcaacaactactggggcttcagaccccggtccctcagagtcaaaatcttcaacattcaagtcaaagaggtcacggtgcaggactccaccaccaccatcgccaacaacctcacctccaccgtccaagtgtttacggacgacgactaccagctgccctacgtcgtcggcaacgggaccgagggatgcctgccggccttccctccgcaggtctttacgctgccgcagtacggttacgcgacgctgaaccgcgacaacacagaaaatcccaccgagaggagcagcttcttctgcctagagtactttcccagcaagatgctgagaacgggcaacaactttgagtttacctacaactttgaggaggtgcccttccactccagcttcgctcccagtcagaacctcttcaagctggccaacccgctggtggaccagtacttgtaccgcttcgtgagcacaaataacactggcggagtccagttcaacaagaacctggccgggagatacgccaacacctacaaaaactggttcccggggcccatgggccgaacccagggctggaacctgggctccggggtcaaccgcgccagtgtcagcgccttcgccacgaccaataggatggagctcgagggcgcgagttaccaggtgcccccgcagccgaacggcatgaccaacaacctccagggcagcaacacctatgccctggagaacactatgatcttcaacagccagccggcgaacccgggcaccaccgccacgtacctcgagggcaacatgctcatcaccagcgagagcgagacgcagccggtgaaccgcgtggcgtacaacgtcggcgggcagatggccaccaacaaccagagctccaccactgcccccgcgaccggcacgtacaacctccaggaaatcgtgcccggcagcgtgtggatggagagggacgtgtacctccaaggacccatctgggccaagatcccagagacgggggcgcactttcacccctctccggccatgggcggattcggactcaaacacccaccgcccatgatgctcatcaagaacacgcctgtgcccggaaatatcaccagcttctcggacgtgcccgtcagcagcttcatcacccagtacagcaccgggcaggtcaccgtggagatggagtgggagctcaagaaggaaaactccaagaggtggaacccagagatccagtacacaaacaactacaacgacccccagtttgtggactttgccccggacagcaccggggaatacagaaccaccagacctatcggaacccgataccttgtgcgacccctttaa

SEQ ID NO: 234 - protein, 532 aa, synthetic construct
MSAGGGGPLGDNNQGADGVGNASGDWHCDSTWMGDRVVTKSTRTWVLPSYNNHQYREIKSGSVDGSNANAYFGYSTPWGYFDFNRFHSHWSPRDWQRLINNYWGFRPRSLRVKIFNIQVKEVTVQDSTTTIANNLTSTVQVFTDDDYQLPYVVGNGTEGCLPAFPPQVFTLPQYGYATLNRDNTENPTERSSFFCLEYFPSKMLRTGNNFEFTYNFEEVPFHSSFAPSQNLFKLANPLVDQYLYRFVSTNNTGGVQFNKNLAGRYANTYKNWFPGPMGRTQGWNLGSGVNRASVSAFATTNRMELEGASYQVPPQPNGMTNNLQGSNTYALENTMIFNSQPANPGTTATYLEGNMLITSESETQPVNRVAYNVGGQMATNNQSSTTAPATGTYNLQEIVPGSVWMERDVYLQGPIWAKIPETGAHFHPSPAMGGFGLKHPPPMMLIKNTPVPGNITSFSDVPVSSFITQYSTGQVTVEMEWELKKENSKRWNPEIQYTNNYNDPQFVDFAPDSTGEYRTTRPIGTRYLVRPL

SEQ ID NO: 235 - DNA, 2175 bp, synthetic construct
  source 1..2175: mol_type = other DNA
atggcttttgttgatcaccctccagattggttggaagaagttggtgaaggtcttcgcgagtttttgggccttgaagcgggcccaccgaaaccaaaacccaatcagcagcatcaagatcaagcccgtggtcttgtgctgcctggttataactatctcggacccggaaacggtctcgatcgaggagagcctgtcaacagggcagacgaggtcgcgcgagagcacgacatctcgtacaacgagcagcttgaggcgggagacaacccctacctcaagtacaaccacgcggacgccgagtttcaggagaagctcgccgacgacacatccttcgggggaaacctcggaaaggcagtctttcaggccaagaaaagggttctcgaaccttttggcctggttgaagagggtgctaagacggcccctaccggaaagcggatagacgaccactttccaaaaagaaagaaggctcggaccgaagaggactccaagccttccacctcgtcagacgccgaagctggacccagcggatcccagcagctgcaaatcccagcccaaccagcctcaagtttgggagctgatacaatgtctgcgggaggtggcggcccattgggcgacaataaccaaggtgccgatggagtgggcaatgcctcgggagattggcattgcgattccacgtggatgggggacagagtcgtcaccaagtccacccgaacctgggtgctgcccagctacaacaaccaccagtaccgagagatcaaaagcggctccgtcgacggaagcaacgccaacgcctactttggatacagcaccccctgggggtactttgactttaaccgcttccacagccactggagcccccgagactggcaaagactcatcaacaactactggggcttcagaccccggtccctcagagtcaaaatcttcaacattcaagtcaaagaggtcacggtgcaggactccaccaccaccatcgccaacaacctcacctccaccgtccaagtgtttacggacgacgactaccagctgccctacgtcgtcggcaacgggaccgagggatgcctgccggccttccctccgcaggtctttacgctgccgcagtacggttacgcgacgctgaaccgcgacaacacagaaaatcccaccgagaggagcagcttcttctgcctagagtactttcccagcaagatgctgagaacgggcaacaactttgagtttacctacaactttgaggaggtgcccttccactccagcttcgctcccagtcagaacctcttcaagctggccaacccgctggtggaccagtacttgtaccgcttcgtgagcacaaataacactggcggagtccagttcaacaagaacctggccgggagatacgccaacacctacaaaaactggttcccggggcccatgggccgaacccagggctggaacctgggctccggggtcaaccgcgccagtgtcagcgccttcgccacgaccaataggatggagctcgagggcgcgagttaccaggtgcccccgcagccgaacggcatgaccaacaacctccagggcagcaacacctatgccctggagaacactatgatcttcaacagccagccggcgaacccgggcaccaccgccacgtacctcgagggcaacatgctcatcaccagcgagagcgagacgcagccggtgaaccgcgtggcgtacaacgtcggcgggcagatggccaccaacaaccagagctccaccactgcccccgcgaccggcacgtacaacctccaggaaatcgtgcccggcagcgtgtggatggagagggacgtgtacctccaaggacccatctgggccaagatcccagagacgggggcgcactttcacccctctccggccatgggcggattcggactcaaacacccaccgcccatgatgctcatcaagaacacgcctgtgcccggaaatatcaccagcttctcggacgtgcccgtcagcagcttcatcacccagtacagcaccgggcaggtcaccgtggagatggagtgggagctcaagaaggaaaactccaagaggtggaacccagagatccagtacacaaacaactacaacgacccccagtttgtggactttgccccggacagcaccggggaatacagaagcaccagacctatcggaacccgataccttgtgcgacccctttaa

SEQ ID NO: 236 - protein, 724 aa, synthetic construct
MAFVDHPPDWLEEVGEGLREFLGLEAGPPKPKPNQQHQDQARGLVLPGYNYLGPGNGLDRGEPVNRADEVAREHDISYNEQLEAGDNPYLKYNHADAEFQEKLADDTSFGGNLGKAVFQAKKRVLEPFGLVEEGAKTAPTGKRIDDHFPKRKKARTEEDSKPSTSSDAEAGPSGSQQLQIPAQPASSLGADTMSAGGGGPLGDNNQGADGVGNASGDWHCDSTWMGDRVVTKSTRTWVLPSYNNHQYREIKSGSVDGSNANAYFGYSTPWGYFDFNRFHSHWSPRDWQRLINNYWGFRPRSLRVKIFNIQVKEVTVQDSTTTIANNLTSTVQVFTDDDYQLPYVVGNGTEGCLPAFPPQVFTLPQYGYATLNRDNTENPTERSSFFCLEYFPSKMLRTGNNFEFTYNFEEVPFHSSFAPSQNLFKLANPLVDQYLYRFVSTNNTGGVQFNKNLAGRYANTYKNWFPGPMGRTQGWNLGSGVNRASVSAFATTNRMELEGASYQVPPQPNGMTNNLQGSNTYALENTMIFNSQPANPGTTATYLEGNMLITSESETQPVNRVAYNVGGQMATNNQSSTTAPATGTYNLQEIVPGSVWMERDVYLQGPIWAKIPETGAHFHPSPAMGGFGLKHPPPMMLIKNTPVPGNITSFSDVPVSSFITQYSTGQVTVEMEWELKKENSKRWNPEIQYTNNYNDPQFVDFAPDSTGEYRSTRPIGTRYLVRPL

SEQ ID NO: 237 - DNA, 1767 bp, synthetic construct
  source 1..1767: mol_type = other DNA
acggcccctaccggaaagcggatagacgaccactttccaaaaagaaagaaggctcggaccgaagaggactccaagccttccacctcgtcagacgccgaagctggacccagcggatcccagcagctgcaaatcccagcccaaccagcctcaagtttgggagctgatacaatgtctgcgggaggtggcggcccattgggcgacaataaccaaggtgccgatggagtgggcaatgcctcgggagattggcattgcgattccacgtggatgggggacagagtcgtcaccaagtccacccgaacctgggtgctgcccagctacaacaaccaccagtaccgagagatcaaaagcggctccgtcgacggaagcaacgccaacgcctactttggatacagcaccccctgggggtactttgactttaaccgcttccacagccactggagcccccgagactggcaaagactcatcaacaactactggggcttcagaccccggtccctcagagtcaaaatcttcaacattcaagtcaaagaggtcacggtgcaggactccaccaccaccatcgccaacaacctcacctccaccgtccaagtgtttacggacgacgactaccagctgccctacgtcgtcggcaacgggaccgagggatgcctgccggccttccctccgcaggtctttacgctgccgcagtacggttacgcgacgctgaaccgcgacaacacagaaaatcccaccgagaggagcagcttcttctgcctagagtactttcccagcaagatgctgagaacgggcaacaactttgagtttacctacaactttgaggaggtgcccttccactccagcttcgctcccagtcagaacctcttcaagctggccaacccgctggtggaccagtacttgtaccgcttcgtgagcacaaataacactggcggagtccagttcaacaagaacctggccgggagatacgccaacacctacaaaaactggttcccggggcccatgggccgaacccagggctggaacctgggctccggggtcaaccgcgccagtgtcagcgccttcgccacgaccaataggatggagctcgagggcgcgagttaccaggtgcccccgcagccgaacggcatgaccaacaacctccagggcagcaacacctatgccctggagaacactatgatcttcaacagccagccggcgaacccgggcaccaccgccacgtacctcgagggcaacatgctcatcaccagcgagagcgagacgcagccggtgaaccgcgtggcgtacaacgtcggcgggcagatggccaccaacaaccagagctccaccactgcccccgcgaccggcacgtacaacctccaggaaatcgtgcccggcagcgtgtggatggagagggacgtgtacctccaaggacccatctgggccaagatcccagagacgggggcgcactttcacccctctccggccatgggcggattcggactcaaacacccaccgcccatgatgctcatcaagaacacgcctgtgcccggaaatatcaccagcttctcggacgtgcccgtcagcagcttcatcacccagtacagcaccgggcaggtcaccgtggagatggagtgggagctcaagaaggaaaactccaagaggtggaacccagagatccagtacacaaacaactacaacgacccccagtttgtggactttgccccggacagcaccggggaatacagaagcaccagacctatcggaacccgataccttgtgcgacccctttaa

SEQ ID NO: 238 - protein, 588 aa, synthetic construct
TAPTGKRIDDHFPKRKKARTEEDSKPSTSSDAEAGPSGSQQLQIPAQPASSLGADTMSAGGGGPLGDNNQGADGVGNASGDWHCDSTWMGDRVVTKSTRTWVLPSYNNHQYREIKSGSVDGSNANAYFGYSTPWGYFDFNRFHSHWSPRDWQRLINNYWGFRPRSLRVKIFNIQVKEVTVQDSTTTIANNLTSTVQVFTDDDYQLPYVVGNGTEGCLPAFPPQVFTLPQYGYATLNRDNTENPTERSSFFCLEYFPSKMLRTGNNFEFTYNFEEVPFHSSFAPSQNLFKLANPLVDQYLYRFVSTNNTGGVQFNKNLAGRYANTYKNWFPGPMGRTQGWNLGSGVNRASVSAFATTNRMELEGASYQVPPQPNGMTNNLQGSNTYALENTMIFNSQPANPGTTATYLEGNMLITSESETQPVNRVAYNVGGQMATNNQSSTTAPATGTYNLQEIVPGSVWMERDVYLQGPIWAKIPETGAHFHPSPAMGGFGLKHPPPMMLIKNTPVPGNITSFSDVPVSSFITQYSTGQVTVEMEWELKKENSKRWNPEIQYTNNYNDPQFVDFAPDSTGEYRSTRPIGTRYLVRPL

SEQ ID NO: 239 - DNA, 1599 bp, synthetic construct
  source 1..1599: mol_type = other DNA
atgtctgcgggaggtggcggcccattgggcgacaataaccaaggtgccgatggagtgggcaatgcctcgggagattggcattgcgattccacgtggatgggggacagagtcgtcaccaagtccacccgaacctgggtgctgcccagctacaacaaccaccagtaccgagagatcaaaagcggctccgtcgacggaagcaacgccaacgcctactttggatacagcaccccctgggggtactttgactttaaccgcttccacagccactggagcccccgagactggcaaagactcatcaacaactactggggcttcagaccccggtccctcagagtcaaaatcttcaacattcaagtcaaagaggtcacggtgcaggactccaccaccaccatcgccaacaacctcacctccaccgtccaagtgtttacggacgacgactaccagctgccctacgtcgtcggcaacgggaccgagggatgcctgccggccttccctccgcaggtctttacgctgccgcagtacggttacgcgacgctgaaccgcgacaacacagaaaatcccaccgagaggagcagcttcttctgcctagagtactttcccagcaagatgctgagaacgggcaacaactttgagtttacctacaactttgaggaggtgcccttccactccagcttcgctcccagtcagaacctcttcaagctggccaacccgctggtggaccagtacttgtaccgcttcgtgagcacaaataacactggcggagtccagttcaacaagaacctggccgggagatacgccaacacctacaaaaactggttcccggggcccatgggccgaacccagggctggaacctgggctccggggtcaaccgcgccagtgtcagcgccttcgccacgaccaataggatggagctcgagggcgcgagttaccaggtgcccccgcagccgaacggcatgaccaacaacctccagggcagcaacacctatgccctggagaacactatgatcttcaacagccagccggcgaacccgggcaccaccgccacgtacctcgagggcaacatgctcatcaccagcgagagcgagacgcagccggtgaaccgcgtggcgtacaacgtcggcgggcagatggccaccaacaaccagagctccaccactgcccccgcgaccggcacgtacaacctccaggaaatcgtgcccggcagcgtgtggatggagagggacgtgtacctccaaggacccatctgggccaagatcccagagacgggggcgcactttcacccctctccggccatgggcggattcggactcaaacacccaccgcccatgatgctcatcaagaacacgcctgtgcccggaaatatcaccagcttctcggacgtgcccgtcagcagcttcatcacccagtacagcaccgggcaggtcaccgtggagatggagtgggagctcaagaaggaaaactccaagaggtggaacccagagatccagtacacaaacaactacaacgacccccagtttgtggactttgccccggacagcaccggggaatacagaagcaccagacctatcggaacccgataccttgtgcgacccctttaa

SEQ ID NO: 240 - protein, 532 aa, synthetic construct
MSAGGGGPLGDNNQGADGVGNASGDWHCDSTWMGDRVVTKSTRTWVLPSYNNHQYREIKSGSVDGSNANAYFGYSTPWGYFDFNRFHSHWSPRDWQRLINNYWGFRPRSLRVKIFNIQVKEVTVQDSTTTIANNLTSTVQVFTDDDYQLPYVVGNGTEGCLPAFPPQVFTLPQYGYATLNRDNTENPTERSSFFCLEYFPSKMLRTGNNFEFTYNFEEVPFHSSFAPSQNLFKLANPLVDQYLYRFVSTNNTGGVQFNKNLAGRYANTYKNWFPGPMGRTQGWNLGSGVNRASVSAFATTNRMELEGASYQVPPQPNGMTNNLQGSNTYALENTMIFNSQPANPGTTATYLEGNMLITSESETQPVNRVAYNVGGQMATNNQSSTTAPATGTYNLQEIVPGSVWMERDVYLQGPIWAKIPETGAHFHPSPAMGGFGLKHPPPMMLIKNTPVPGNITSFSDVPVSSFITQYSTGQVTVEMEWELKKENSKRWNPEIQYTNNYNDPQFVDFAPDSTGEYRSTRPIGTRYLVRPL

SEQ ID NO: 241 - DNA, 2211 bp, synthetic construct
  source 1..2211: mol_type = other DNA
atggctgccgatggttatcttccagattggctcgaggacaaccttagtgaaggaattcgcgagtggtgggctttgaaacctggagcccctcaacccaaggcaaatcaacaacatcaagacaacgctcgaggtcttgtgcttccgggttacaaataccttggacccggcaacggactcgacaagggggagccggtcaacgcagcagacgcggcggccctcgagcacgacaaggcctacgaccagcagctcaaggccggagacaacccgtacctcaagtacaaccacgccgacgccgagttccaggagcggctcaaagaagatacgtcttttgggggcaacctcgggcgagcagtcttccaggccaaaaagaggcttcttgaacctcttggtctggttgaggaagcggctaagacggctcctggaaagaagaggcctgtagagcagtctcctcaggaaccggactcctccgcgggtattggcaaatcgggtgcacagcccgctaaaaagagactcaatttcggtcagactggcgacacagagtcagtcccagaccctcaaccaatcggagaacctcccgcagccccctcaggtgtgggatctcttacaatggcttcaggtggtggcgcaccagtggcagacaataacgaaggtgccgatggagtgggtagttcctcgggaaattggcattgcgattcccaatggctgggggacagagtcatcaccaccagcacccgaacctgggccctgcccacctacaacaatcacctctacaagcaaatctccaacagcacatctggaggatcttcaaatgacaacgcctacttcggctacagcaccccctgggggtattttgacttcaacagattccactgccacttctcaccacgtgactggcagcgactcatcaacaacaactggggattccggcctaagcgactcaacttcaagctcttcaacattcaggtcaaagaggttacggacaacaatggagtcaagaccatcgccaataaccttaccagcacggtccaggtcttcacggactcagactataagctcccgtacgtgctcgggtcggctcacgagggctgcctcccgccgttcccagcggacgttttcatgattcctcagtacgggtatctgacgcttaatgatggaagccaggccgtgggtcgttcgtccttttactgcctggaatatttcccgtcgcaaatgctaagaacgggtaacaacttccagttcagctacgagtttgagaacgtacctttccatagcagctacgctcacagccaaagcctggaccgactaatgaatccactcatcgaccaatacttgtactatctctcaaagactattaacggttctggacagaatcaacaaacgctaaaattcagtgtggccggacccagcaacatggctgtccagggaagaaactacatacctggacccagctaccgacaacaacgtgtctcaaccactgtgactcaaaacaacaacagcgaatttgcttggcctggagcttcttcttgggctctcaatggacgtaatagcttgatgaatcctggacctgctatggccagccacaaagaaggagaggaccgtttctttcctttgtctggatctttaatttttggcaaacaaggaactggaagagacaacgtggatgcggacaaagtcatgataaccaacgaagaagaaattaaaactactaacccggtagcaacggagtcctatggacaagtggccacaaaccaccagagtgcccaagcacaggcgcagaccggctgggttcaaaaccaaggaatacttccgggtatggtttggcaggacagagatgtgtacctgcaaggacccatttgggccaaaattcctcacacggacggcaactttcacccttctccgctgatgggagggtttggaatgaagcacccgcctcctcagatcctcatcaaaaacacacctgtacctgcggatcctccaacggccttcaacaaggacaagctgaactctttcatcacccagtattctactggccaagtcagcgtggagatcgagtgggagctgcagaaggaaaacagcaagcgctggaacccggagatccagtacacttccaactattacaagtctaataatgttgaatttgctgttaatactgaaggtgtatatagtgaaccccgccccattggcaccagatacctgactcgtaatctgtaa

SEQ ID NO: 242 - protein, 736 aa, synthetic construct
MAADGYLPDWLEDNLSEGIREWWALKPGAPQPKANQQHQDNARGLVLPGYKYLGPGNGLDKGEPVNAADAAALEHDKAYDQQLKAGDNPYLKYNHADAEFQERLKEDTSFGGNLGRAVFQAKKRLLEPLGLVEEAAKTAPGKKRPVEQSPQEPDSSAGIGKSGAQPAKKRLNFGQTGDTESVPDPQPIGEPPAAPSGVGSLTMASGGGAPVADNNEGADGVGSSSGNWHCDSQWLGDRVITTSTRTWALPTYNNHLYKQISNSTSGGSSNDNAYFGYSTPWGYFDFNRFHCHFSPRDWQRLINNNWGFRPKRLNFKLFNIQVKEVTDNNGVKTIANNLTSTVQVFTDSDYKLPYVLGSAHEGCLPPFPADVFMIPQYGYLTLNDGSQAVGRSSFYCLEYFPSQMLRTGNNFQFSYEFENVPFHSSYAHSQSLDRLMNPLIDQYLYYLSKTINGSGQNQQTLKFSVAGPSNMAVQGRNYIPGPSYRQQRVSTTVTQNNNSEFAWPGASSWALNGRNSLMNPGPAMASHKEGEDRFFPLSGSLIFGKQGTGRDNVDADKVMITNEEEIKTTNPVATESYGQVATNHQSAQAQAQTGWVQNQGILPGMVWQDRDVYLQGPIWAKIPHTDGNFHPSPLMGGFGMKHPPPQILIKNTPVPADPPTAFNKDKLNSFITQYSTGQVSVEIEWELQKENSKRWNPEIQYTSNYYKSNNVEFAVNTEGVYSEPRPIGTRYLTRNL

SEQ ID NO: 243 - DNA, 1800 bp, synthetic construct
  source 1..1800: mol_type = other DNA
acggctcctggaaagaagaggcctgtagagcagtctcctcaggaaccggactcctccgcgggtattggcaaatcgggtgcacagcccgctaaaaagagactcaatttcggtcagactggcgacacagagtcagtcccagaccctcaaccaatcggagaacctcccgcagccccctcaggtgtgggatctcttacaatggcttcaggtggtggcgcaccagtggcagacaataacgaaggtgccgatggagtgggtagttcctcgggaaattggcattgcgattcccaatggctgggggacagagtcatcaccaccagcacccgaacctgggccctgcccacctacaacaatcacctctacaagcaaatctccaacagcacatctggaggatcttcaaatgacaacgcctacttcggctacagcaccccctgggggtattttgacttcaacagattccactgccacttctcaccacgtgactggcagcgactcatcaacaacaactggggattccggcctaagcgactcaacttcaagctcttcaacattcaggtcaaagaggttacggacaacaatggagtcaagaccatcgccaataaccttaccagcacggtccaggtcttcacggactcagactataagctcccgtacgtgctcgggtcggctcacgagggctgcctcccgccgttcccagcggacgttttcatgattcctcagtacgggtatctgacgcttaatgatggaagccaggccgtgggtcgttcgtccttttactgcctggaatatttcccgtcgcaaatgctaagaacgggtaacaacttccagttcagctacgagtttgagaacgtacctttccatagcagctacgctcacagccaaagcctggaccgactaatgaatccactcatcgaccaatacttgtactatctctcaaagactattaacggttctggacagaatcaacaaacgctaaaattcagtgtggccggacccagcaacatggctgtccagggaagaaactacatacctggacccagctaccgacaacaacgtgtctcaaccactgtgactcaaaacaacaacagcgaatttgcttggcctggagcttcttcttgggctctcaatggacgtaatagcttgatgaatcctggacctgctatggccagccacaaagaaggagaggaccgtttctttcctttgtctggatctttaatttttggcaaacaaggaactggaagagacaacgtggatgcggacaaagtcatgataaccaacgaagaagaaattaaaactactaacccggtagcaacggagtcctatggacaagtggccacaaaccaccagagtgcccaagcacaggcgcagaccggctgggttcaaaaccaaggaatacttccgggtatggtttggcaggacagagatgtgtacctgcaaggacccatttgggccaaaattcctcacacggacggcaactttcacccttctccgctgatgggagggtttggaatgaagcacccgcctcctcagatcctcatcaaaaacacacctgtacctgcggatcctccaacggccttcaacaaggacaagctgaactctttcatcacccagtattctactggccaagtcagcgtggagatcgagtgggagctgcagaaggaaaacagcaagcgctggaacccggagatccagtacacttccaactattacaagtctaataatgttgaatttgctgttaatactgaaggtgtatatagtgaaccccgccccattggcaccagatacctgactcgtaatctgtaa

SEQ ID NO: 244 - protein, 599 aa, synthetic construct
TAPGKKRPVEQSPQEPDSSAGIGKSGAQPAKKRLNFGQTGDTESVPDPQPIGEPPAAPSGVGSLTMASGGGAPVADNNEGADGVGSSSGNWHCDSQWLGDRVITTSTRTWALPTYNNHLYKQISNSTSGGSSNDNAYFGYSTPWGYFDFNRFHCHFSPRDWQRLINNNWGFRPKRLNFKLFNIQVKEVTDNNGVKTIANNLTSTVQVFTDSDYKLPYVLGSAHEGCLPPFPADVFMIPQYGYLTLNDGSQAVGRSSFYCLEYFPSQMLRTGNNFQFSYEFENVPFHSSYAHSQSLDRLMNPLIDQYLYYLSKTINGSGQNQQTLKFSVAGPSNMAVQGRNYIPGPSYRQQRVSTTVTQNNNSEFAWPGASSWALNGRNSLMNPGPAMASHKEGEDRFFPLSGSLIFGKQGTGRDNVDADKVMITNEEEIKTTNPVATESYGQVATNHQSAQAQAQTGWVQNQGILPGMVWQDRDVYLQGPIWAKIPHTDGNFHPSPLMGGFGMKHPPPQILIKNTPVPADPPTAFNKDKLNSFITQYSTGQVSVEIEWELQKENSKRWNPEIQYTSNYYKSNNVEFAVNTEGVYSEPRPIGTRYLTRNL

SEQ ID NO: 245 - DNA, 1605 bp, synthetic construct
  source 1..1605: mol_type = other DNA
atggcttcaggtggtggcgcaccagtggcagacaataacgaaggtgccgatggagtgggtagttcctcgggaaattggcattgcgattcccaatggctgggggacagagtcatcaccaccagcacccgaacctgggccctgcccacctacaacaatcacctctacaagcaaatctccaacagcacatctggaggatcttcaaatgacaacgcctacttcggctacagcaccccctgggggtattttgacttcaacagattccactgccacttctcaccacgtgactggcagcgactcatcaacaacaactggggattccggcctaagcgactcaacttcaagctcttcaacattcaggtcaaagaggttacggacaacaatggagtcaagaccatcgccaataaccttaccagcacggtccaggtcttcacggactcagactataagctcccgtacgtgctcgggtcggctcacgagggctgcctcccgccgttcccagcggacgttttcatgattcctcagtacgggtatctgacgcttaatgatggaagccaggccgtgggtcgttcgtccttttactgcctggaatatttcccgtcgcaaatgctaagaacgggtaacaacttccagttcagctacgagtttgagaacgtacctttccatagcagctacgctcacagccaaagcctggaccgactaatgaatccactcatcgaccaatacttgtactatctctcaaagactattaacggttctggacagaatcaacaaacgctaaaattcagtgtggccggacccagcaacatggctgtccagggaagaaactacatacctggacccagctaccgacaacaacgtgtctcaaccactgtgactcaaaacaacaacagcgaatttgcttggcctggagcttcttcttgggctctcaatggacgtaatagcttgatgaatcctggacctgctatggccagccacaaagaaggagaggaccgtttctttcctttgtctggatctttaatttttggcaaacaaggaactggaagagacaacgtggatgcggacaaagtcatgataaccaacgaagaagaaattaaaactactaacccggtagcaacggagtcctatggacaagtggccacaaaccaccagagtgcccaagcacaggcgcagaccggctgggttcaaaaccaaggaatacttccgggtatggtttggcaggacagagatgtgtacctgcaaggacccatttgggccaaaattcctcacacggacggcaactttcacccttctccgctgatgggagggtttggaatgaagcacccgcctcctcagatcctcatcaaaaacacacctgtacctgcggatcctccaacggccttcaacaaggacaagctgaactctttcatcacccagtattctactggccaagtcagcgtggagatcgagtgggagctgcagaaggaaaacagcaagcgctggaacccggagatccagtacacttccaactattacaagtctaataatgttgaatttgctgttaatactgaaggtgtatatagtgaaccccgccccattggcaccagatacctgactcgtaatctgtaa

SEQ ID NO: 246 - protein, 534 aa, synthetic construct
MASGGGAPVADNNEGADGVGSSSGNWHCDSQWLGDRVITTSTRTWALPTYNNHLYKQISNSTSGGSSNDNAYFGYSTPWGYFDFNRFHCHFSPRDWQRLINNNWGFRPKRLNFKLFNIQVKEVTDNNGVKTIANNLTSTVQVFTDSDYKLPYVLGSAHEGCLPPFPADVFMIPQYGYLTLNDGSQAVGRSSFYCLEYFPSQMLRTGNNFQFSYEFENVPFHSSYAHSQSLDRLMNPLIDQYLYYLSKTINGSGQNQQTLKFSVAGPSNMAVQGRNYIPGPSYRQQRVSTTVTQNNNSEFAWPGASSWALNGRNSLMNPGPAMASHKEGEDRFFPLSGSLIFGKQGTGRDNVDADKVMITNEEEIKTTNPVATESYGQVATNHQSAQAQAQTGWVQNQGILPGMVWQDRDVYLQGPIWAKIPHTDGNFHPSPLMGGFGMKHPPPQILIKNTPVPADPPTAFNKDKLNSFITQYSTGQVSVEIEWELQKENSKRWNPEIQYTSNYYKSNNVEFAVNTEGVYSEPRPIGTRYLTRNL

SEQ ID NO: 247 - DNA, 2211 bp, synthetic construct
  source 1..2211: mol_type = other DNA
atggctgccgatggttatcttccagattggctcgaggacaaccttagtgaaggaattcgcgagtggtgggctttgaaacctggagcccctcaacccaaggcaaatcaacaacatcaagacaacgctcgaggtcttgtgcttccgggttacaaataccttggacccggcaacggactcgacaagggggagccggtcaacgcagcagacgcggcggccctcgagcacgacaaggcctacgaccagcagctcaaggccggagacaacccgtacctcaagtacaaccacgccgacgccgagttccaggagcggctcaaagaagatacgtcttttgggggcaacctcgggcgagcagtcttccaggccaaaaagaggcttcttgaacctcttggtctggttgaggaagcggctaagacggctcctggaaagaagaggcctgtagagcagtctcctcaggaaccggactcctccgcgggtattggcaaatcgggtgcacagcccgctaaaaagagactcaatttcggtcagactggcgacacagagtcagtcccagaccctcaaccaatcggagaacctcccgcagccccctcaggtgtgggatctcttacaatggcttcaggtggtggcgcaccagtggcagacaataacgaaggtgccgatggagtgggtagttcctcgggaaattggcattgcgattcccaatggctgggggacagagtcatcaccaccagcacccgaacctgggccctgcccacctacaacaatcacctctacaagcaaatctccaacagcacatctggaggatcttcaaatgacaacgcctacttcggctacagcaccccctgggggtattttgacttcaacagattccactgccacttctcaccacgtgactggcagcgactcatcaacaacaactggggattccggcctaagcgactcaacttcaagctcttcaacattcaggtcaaagaggttacggacaacaatggagtcaagaccatcgccaataaccttaccagcacggtccaggtcttcacggactcagactatagactcccgtacgtgctcgggtcggctcacgagggctgcctcccgccgttcccagcggacgttttcatgattcctcagtacgggtatctgacgcttaatgatggaagccaggccgtgggtcgttcgtccttttactgcctggaatatttcccgtcgcaaatgctaagaacgggtaacaacttccagttcagctacgagtttgagaacgtacctttccatagcagctacgctcacagccaaagcctggaccgactaatgaatccactcatcgaccaatacttgtactatctctcaaagactattaacggttctggacagaatcaacaaacgctaaaattcagtgtggccggacccagcaacatggctgtccagggaagaaactacatacctggacccagctaccgacaacaacgtgtctcaaccactgtgactcaaaacaacaacagcgaatttgcttggcctggagcttcttcttgggctctcaatggacgtaatagcttgatgaatcctggacctgctatggccagccacaaagaaggagaggaccgtttctttcctttgtctggatctttaatttttggcaaacaaggaactggaagagacaacgtggatgcggacaaagtcatgataaccaacgaagaagaaattaaaactactaacccggtagcaacggagtcctatggacaagtggccacaaaccaccagagtgcccaagcacaggcgcagaccggctgggttcaaaaccaaggaatacttccgggtatggtttggcaggacagagatgtgtacctgcaaggacccatttgggccaaaattcctcacacggacggcaactttcacccttctccgctgatgggagggtttggaatgaagcacccgcctcctcagatcctcatcaaaaacacacctgtacctgcggatcctccaacggccttcaacaaggacaagctgaactctttcatcacccagtattctactggccaagtcagcgtggagatcgagtgggagctgcagaaggaaaacagcaagcgctggaacccggagatccagtacacttccaactattacaagtctaataatgttgaatttgctgttaatactgaaggtgtatatagtgaaccccgccccattggcaccagatacctgactcgtaatctgtaa

SEQ ID NO: 248 - protein, 736 aa, synthetic construct
MAADGYLPDWLEDNLSEGIREWWALKPGAPQPKANQQHQDNARGLVLPGYKYLGPGNGLDKGEPVNAADAAALEHDKAYDQQLKAGDNPYLKYNHADAEFQERLKEDTSFGGNLGRAVFQAKKRLLEPLGLVEEAAKTAPGKKRPVEQSPQEPDSSAGIGKSGAQPAKKRLNFGQTGDTESVPDPQPIGEPPAAPSGVGSLTMASGGGAPVADNNEGADGVGSSSGNWHCDSQWLGDRVITTSTRTWALPTYNNHLYKQISNSTSGGSSNDNAYFGYSTPWGYFDFNRFHCHFSPRDWQRLINNNWGFRPKRLNFKLFNIQVKEVTDNNGVKTIANNLTSTVQVFTDSDYRLPYVLGSAHEGCLPPFPADVFMIPQYGYLTLNDGSQAVGRSSFYCLEYFPSQMLRTGNNFQFSYEFENVPFHSSYAHSQSLDRLMNPLIDQYLYYLSKTINGSGQNQQTLKFSVAGPSNMAVQGRNYIPGPSYRQQRVSTTVTQNNNSEFAWPGASSWALNGRNSLMNPGPAMASHKEGEDRFFPLSGSLIFGKQGTGRDNVDADKVMITNEEEIKTTNPVATESYGQVATNHQSAQAQAQTGWVQNQGILPGMVWQDRDVYLQGPIWAKIPHTDGNFHPSPLMGGFGMKHPPPQILIKNTPVPADPPTAFNKDKLNSFITQYSTGQVSVEIEWELQKENSKRWNPEIQYTSNYYKSNNVEFAVNTEGVYSEPRPIGTRYLTRNL

SEQ ID NO: 249 - DNA, 1800 bp, synthetic construct
  source 1..1800: mol_type = other DNA
acggctcctggaaagaagaggcctgtagagcagtctcctcaggaaccggactcctccgcgggtattggcaaatcgggtgcacagcccgctaaaaagagactcaatttcggtcagactggcgacacagagtcagtcccagaccctcaaccaatcggagaacctcccgcagccccctcaggtgtgggatctcttacaatggcttcaggtggtggcgcaccagtggcagacaataacgaaggtgccgatggagtgggtagttcctcgggaaattggcattgcgattcccaatggctgggggacagagtcatcaccaccagcacccgaacctgggccctgcccacctacaacaatcacctctacaagcaaatctccaacagcacatctggaggatcttcaaatgacaacgcctacttcggctacagcaccccctgggggtattttgacttcaacagattccactgccacttctcaccacgtgactggcagcgactcatcaacaacaactggggattccggcctaagcgactcaacttcaagctcttcaacattcaggtcaaagaggttacggacaacaatggagtcaagaccatcgccaataaccttaccagcacggtccaggtcttcacggactcagactatagactcccgtacgtgctcgggtcggctcacgagggctgcctcccgccgttcccagcggacgttttcatgattcctcagtacgggtatctgacgcttaatgatggaagccaggccgtgggtcgttcgtccttttactgcctggaatatttcccgtcgcaaatgctaagaacgggtaacaacttccagttcagctacgagtttgagaacgtacctttccatagcagctacgctcacagccaaagcctggaccgactaatgaatccactcatcgaccaatacttgtactatctctcaaagactattaacggttctggacagaatcaacaaacgctaaaattcagtgtggccggacccagcaacatggctgtccagggaagaaactacatacctggacccagctaccgacaacaacgtgtctcaaccactgtgactcaaaacaacaacagcgaatttgcttggcctggagcttcttcttgggctctcaatggacgtaatagcttgatgaatcctggacctgctatggccagccacaaagaaggagaggaccgtttctttcctttgtctggatctttaatttttggcaaacaaggaactggaagagacaacgtggatgcggacaaagtcatgataaccaacgaagaagaaattaaaactactaacccggtagcaacggagtcctatggacaagtggccacaaaccaccagagtgcccaagcacaggcgcagaccggctgggttcaaaaccaaggaatacttccgggtatggtttggcaggacagagatgtgtacctgcaaggacccatttgggccaaaattcctcacacggacggcaactttcacccttctccgctgatgggagggtttggaatgaagcacccgcctcctcagatcctcatcaaaaacacacctgtacctgcggatcctccaacggccttcaacaaggacaagctgaactctttcatcacccagtattctactggccaagtcagcgtggagatcgagtgggagctgcagaaggaaaacagcaagcgctggaacccggagatccagtacacttccaactattacaagtctaataatgttgaatttgctgttaatactgaaggtgtatatagtgaaccccgccccattggcaccagatacctgactcgtaatctgtaa

SEQ ID NO: 250 - protein, 599 aa, synthetic construct
TAPGKKRPVEQSPQEPDSSAGIGKSGAQPAKKRLNFGQTGDTESVPDPQPIGEPPAAPSGVGSLTMASGGGAPVADNNEGADGVGSSSGNWHCDSQWLGDRVITTSTRTWALPTYNNHLYKQISNSTSGGSSNDNAYFGYSTPWGYFDFNRFHCHFSPRDWQRLINNNWGFRPKRLNFKLFNIQVKEVTDNNGVKTIANNLTSTVQVFTDSDYRLPYVLGSAHEGCLPPFPADVFMIPQYGYLTLNDGSQAVGRSSFYCLEYFPSQMLRTGNNFQFSYEFENVPFHSSYAHSQSLDRLMNPLIDQYLYYLSKTINGSGQNQQTLKFSVAGPSNMAVQGRNYIPGPSYRQQRVSTTVTQNNNSEFAWPGASSWALNGRNSLMNPGPAMASHKEGEDRFFPLSGSLIFGKQGTGRDNVDADKVMITNEEEIKTTNPVATESYGQVATNHQSAQAQAQTGWVQNQGILPGMVWQDRDVYLQGPIWAKIPHTDGNFHPSPLMGGFGMKHPPPQILIKNTPVPADPPTAFNKDKLNSFITQYSTGQVSVEIEWELQKENSKRWNPEIQYTSNYYKSNNVEFAVNTEGVYSEPRPIGTRYLTRNL

SEQ ID NO: 251 - DNA, 1605 bp, synthetic construct
  source 1..1605: mol_type = other DNA
atggcttcaggtggtggcgcaccagtggcagacaataacgaaggtgccgatggagtgggtagttcctcgggaaattggcattgcgattcccaatggctgggggacagagtcatcaccaccagcacccgaacctgggccctgcccacctacaacaatcacctctacaagcaaatctccaacagcacatctggaggatcttcaaatgacaacgcctacttcggctacagcaccccctgggggtattttgacttcaacagattccactgccacttctcaccacgtgactggcagcgactcatcaacaacaactggggattccggcctaagcgactcaacttcaagctcttcaacattcaggtcaaagaggttacggacaacaatggagtcaagaccatcgccaataaccttaccagcacggtccaggtcttcacggactcagactatagactcccgtacgtgctcgggtcggctcacgagggctgcctcccgccgttcccagcggacgttttcatgattcctcagtacgggtatctgacgcttaatgatggaagccaggccgtgggtcgttcgtccttttactgcctggaatatttcccgtcgcaaatgctaagaacgggtaacaacttccagttcagctacgagtttgagaacgtacctttccatagcagctacgctcacagccaaagcctggaccgactaatgaatccactcatcgaccaatacttgtactatctctcaaagactattaacggttctggacagaatcaacaaacgctaaaattcagtgtggccggacccagcaacatggctgtccagggaagaaactacatacctggacccagctaccgacaacaacgtgtctcaaccactgtgactcaaaacaacaacagcgaatttgcttggcctggagcttcttcttgggctctcaatggacgtaatagcttgatgaatcctggacctgctatggccagccacaaagaaggagaggaccgtttctttcctttgtctggatctttaatttttggcaaacaaggaactggaagagacaacgtggatgcggacaaagtcatgataaccaacgaagaagaaattaaaactactaacccggtagcaacggagtcctatggacaagtggccacaaaccaccagagtgcccaagcacaggcgcagaccggctgggttcaaaaccaaggaatacttccgggtatggtttggcaggacagagatgtgtacctgcaaggacccatttgggccaaaattcctcacacggacggcaactttcacccttctccgctgatgggagggtttggaatgaagcacccgcctcctcagatcctcatcaaaaacacacctgtacctgcggatcctccaacggccttcaacaaggacaagctgaactctttcatcacccagtattctactggccaagtcagcgtggagatcgagtgggagctgcagaaggaaaacagcaagcgctggaacccggagatccagtacacttccaactattacaagtctaataatgttgaatttgctgttaatactgaaggtgtatatagtgaaccccgccccattggcaccagatacctgactcgtaatctgtaa

SEQ ID NO: 252 - protein, 534 aa, synthetic construct
MASGGGAPVADNNEGADGVGSSSGNWHCDSQWLGDRVITTSTRTWALPTYNNHLYKQISNSTSGGSSNDNAYFGYSTPWGYFDFNRFHCHFSPRDWQRLINNNWGFRPKRLNFKLFNIQVKEVTDNNGVKTIANNLTSTVQVFTDSDYRLPYVLGSAHEGCLPPFPADVFMIPQYGYLTLNDGSQAVGRSSFYCLEYFPSQMLRTGNNFQFSYEFENVPFHSSYAHSQSLDRLMNPLIDQYLYYLSKTINGSGQNQQTLKFSVAGPSNMAVQGRNYIPGPSYRQQRVSTTVTQNNNSEFAWPGASSWALNGRNSLMNPGPAMASHKEGEDRFFPLSGSLIFGKQGTGRDNVDADKVMITNEEEIKTTNPVATESYGQVATNHQSAQAQAQTGWVQNQGILPGMVWQDRDVYLQGPIWAKIPHTDGNFHPSPLMGGFGMKHPPPQILIKNTPVPADPPTAFNKDKLNSFITQYSTGQVSVEIEWELQKENSKRWNPEIQYTSNYYKSNNVEFAVNTEGVYSEPRPIGTRYLTRNL

SEQ ID NO: 253 - DNA, 2211 bp, synthetic construct
  source 1..2211: mol_type = other DNA
atggctgccgatggttatcttccagattggctcgaggacaaccttagtgaaggaattcgcgagtggtgggctttgaaacctggagcccctcaacccaaggcaaatcaacaacatcaagacaacgctcgaggtcttgtgcttccgggttacaaataccttggacccggcaacggactcgacaagggggagccggtcaacgcagcagacgcggcggccctcgagcacgacaaggcctacgaccagcagctcaaggccggagacaacccgtacctcaagtacaaccacgccgacgccgagttccaggagcggctcaaagaagatacgtcttttgggggcaacctcgggcgagcagtcttccaggccaaaaagaggcttcttgaacctcttggtctggttgaggaagcggctaagacggctcctggaaagaagaggcctgtagagcagtctcctcaggaaccggactcctccgcgggtattggcaaatcgggtgcacagcccgctaaaaagagactcaatttcggtcagactggcgacacagagtcagtcccagaccctcaaccaatcggagaacctcccgcagccccctcaggtgtgggatctcttacaatggcttcaggtggtggcgcaccagtggcagacaataacgaaggtgccgatggagtgggtagttcctcgggaaattggcattgcgatacccaatggctgggggacagagtcatcaccaccagcacccgaacctgggccctgcccacctacaacaatcacctctacaagcaaatctccaacagcacatctggaggatcttcaaatgacaacgcctacttcggctacagcaccccctgggggtattttgacttcaacagattccactgccacttctcaccacgtgactggcagcgactcatcaacaacaactggggattccggcctaagcgactcaacttcaagctcttcaacattcaggtcaaagaggttacggacaacaatggagtcaagaccatcgccaataaccttaccagcacggtccaggtcttcacggactcagactatcagctcccgtacgtgctcgggtcggctcacgagggctgcctcccgccgttcccagcggacgttttcatgattcctcagtacgggtatctgacgcttaatgatggaagccaggccgtgggtcgttcgtccttttactgcctggaatatttcccgtcgcaaatgctaagaacgggtaacaacttccagttcagctacgagtttgagaacgtacctttccatagcagctacgctcacagccaaagcctggaccgactaatgaatccactcatcgaccaatacttgtactatctctcaaagactattaacggttctggacagaatcaacaaacgctaaaattcagtgtggccggacccagcaacatggctgtccagggaagaaactacatacctggacccagctaccgacaacaacgtgtctcaaccactgtgactcaaaacaacaacagcgaatttgcttggcctggagcttcttcttgggctctcaatggacgtaatagcttgatgaatcctggacctgctatggccagccacaaagaaggagaggaccgtttctttcctttgtctggatctttaatttttggcaaacaaggaactggaagagacaacgtggatgcggacaaagtcatgataaccaacgaagaagaaattaaaactactaacccggtagcaacggagtcctatggacaagtggccacaaaccaccagagtgcccaagcacaggcgcagaccggctgggttcaaaaccaaggaatacttccgggtatggtttggcaggacagagatgtgtacctgcaaggacccatttgggccaaaattcctcacacggacggcaactttcacccttctccgctgatgggagggtttggaatgaagcacccgcctcctcagatcctcatcaaaaacacacctgtacctgcggatcctccaacggccttcaacaaggacaagctgaactctttcatcacccagtattctactggccaagtcagcgtggagatcgagtgggagctgcagaaggaaaacagcaagcgctggaacccggagatccagtacacttccaactattacaagtctaataatgttgaatttgctgttaatactgaaggtgtatatagtgaaccccgccccattggcaccagatacctgactcgtaatctgtaa

SEQ ID NO: 254 - protein, 736 aa, synthetic construct
MAADGYLPDWLEDNLSEGIREWWALKPGAPQPKANQQHQDNARGLVLPGYKYLGPGNGLDKGEPVNAADAAALEHDKAYDQQLKAGDNPYLKYNHADAEFQERLKEDTSFGGNLGRAVFQAKKRLLEPLGLVEEAAKTAPGKKRPVEQSPQEPDSSAGIGKSGAQPAKKRLNFGQTGDTESVPDPQPIGEPPAAPSGVGSLTMASGGGAPVADNNEGADGVGSSSGNWHCDTQWLGDRVITTSTRTWALPTYNNHLYKQISNSTSGGSSNDNAYFGYSTPWGYFDFNRFHCHFSPRDWQRLINNNWGFRPKRLNFKLFNIQVKEVTDNNGVKTIANNLTSTVQVFTDSDYQLPYVLGSAHEGCLPPFPADVFMIPQYGYLTLNDGSQAVGRSSFYCLEYFPSQMLRTGNNFQFSYEFENVPFHSSYAHSQSLDRLMNPLIDQYLYYLSKTINGSGQNQQTLKFSVAGPSNMAVQGRNYIPGPSYRQQRVSTTVTQNNNSEFAWPGASSWALNGRNSLMNPGPAMASHKEGEDRFFPLSGSLIFGKQGTGRDNVDADKVMITNEEEIKTTNPVATESYGQVATNHQSAQAQAQTGWVQNQGILPGMVWQDRDVYLQGPIWAKIPHTDGNFHPSPLMGGFGMKHPPPQILIKNTPVPADPPTAFNKDKLNSFITQYSTGQVSVEIEWELQKENSKRWNPEIQYTSNYYKSNNVEFAVNTEGVYSEPRPIGTRYLTRNL

SEQ ID NO: 255 - DNA, 1800 bp, synthetic construct
  source 1..1800: mol_type = other DNA
acggctcctggaaagaagaggcctgtagagcagtctcctcaggaaccggactcctccgcgggtattggcaaatcgggtgcacagcccgctaaaaagagactcaatttcggtcagactggcgacacagagtcagtcccagaccctcaaccaatcggagaacctcccgcagccccctcaggtgtgggatctcttacaatggcttcaggtggtggcgcaccagtggcagacaataacgaaggtgccgatggagtgggtagttcctcgggaaattggcattgcgatacccaatggctgggggacagagtcatcaccaccagcacccgaacctgggccctgcccacctacaacaatcacctctacaagcaaatctccaacagcacatctggaggatcttcaaatgacaacgcctacttcggctacagcaccccctgggggtattttgacttcaacagattccactgccacttctcaccacgtgactggcagcgactcatcaacaacaactggggattccggcctaagcgactcaacttcaagctcttcaacattcaggtcaaagaggttacggacaacaatggagtcaagaccatcgccaataaccttaccagcacggtccaggtcttcacggactcagactatcagctcccgtacgtgctcgggtcggctcacgagggctgcctcccgccgttcccagcggacgttttcatgattcctcagtacgggtatctgacgcttaatgatggaagccaggccgtgggtcgttcgtccttttactgcctggaatatttcccgtcgcaaatgctaagaacgggtaacaacttccagttcagctacgagtttgagaacgtacctttccatagcagctacgctcacagccaaagcctggaccgactaatgaatccactcatcgaccaatacttgtactatctctcaaagactattaacggttctggacagaatcaacaaacgctaaaattcagtgtggccggacccagcaacatggctgtccagggaagaaactacatacctggacccagctaccgacaacaacgtgtctcaaccactgtgactcaaaacaacaacagcgaatttgcttggcctggagcttcttcttgggctctcaatggacgtaatagcttgatgaatcctggacctgctatggccagccacaaagaaggagaggaccgtttctttcctttgtctggatctttaatttttggcaaacaaggaactggaagagacaacgtggatgcggacaaagtcatgataaccaacgaagaagaaattaaaactactaacccggtagcaacggagtcctatggacaagtggccacaaaccaccagagtgcccaagcacaggcgcagaccggctgggttcaaaaccaaggaatacttccgggtatggtttggcaggacagagatgtgtacctgcaaggacccatttgggccaaaattcctcacacggacggcaactttcacccttctccgctgatgggagggtttggaatgaagcacccgcctcctcagatcctcatcaaaaacacacctgtacctgcggatcctccaacggccttcaacaaggacaagctgaactctttcatcacccagtattctactggccaagtcagcgtggagatcgagtgggagctgcagaaggaaaacagcaagcgctggaacccggagatccagtacacttccaactattacaagtctaataatgttgaatttgctgttaatactgaaggtgtatatagtgaaccccgccccattggcaccagatacctgactcgtaatctgtaa

SEQ ID NO: 256 - protein, 599 aa, synthetic construct
TAPGKKRPVEQSPQEPDSSAGIGKSGAQPAKKRLNFGQTGDTESVPDPQPIGEPPAAPSGVGSLTMASGGGAPVADNNEGADGVGSSSGNWHCDTQWLGDRVITTSTRTWALPTYNNHLYKQISNSTSGGSSNDNAYFGYSTPWGYFDFNRFHCHFSPRDWQRLINNNWGFRPKRLNFKLFNIQVKEVTDNNGVKTIANNLTSTVQVFTDSDYQLPYVLGSAHEGCLPPFPADVFMIPQYGYLTLNDGSQAVGRSSFYCLEYFPSQMLRTGNNFQFSYEFENVPFHSSYAHSQSLDRLMNPLIDQYLYYLSKTINGSGQNQQTLKFSVAGPSNMAVQGRNYIPGPSYRQQRVSTTVTQNNNSEFAWPGASSWALNGRNSLMNPGPAMASHKEGEDRFFPLSGSLIFGKQGTGRDNVDADKVMITNEEEIKTTNPVATESYGQVATNHQSAQAQAQTGWVQNQGILPGMVWQDRDVYLQGPIWAKIPHTDGNFHPSPLMGGFGMKHPPPQILIKNTPVPADPPTAFNKDKLNSFITQYSTGQVSVEIEWELQKENSKRWNPEIQYTSNYYKSNNVEFAVNTEGVYSEPRPIGTRYLTRNL

SEQ ID NO: 257 - DNA, 1605 bp, synthetic construct
  source 1..1605: mol_type = other DNA
atggcttcaggtggtggcgcaccagtggcagacaataacgaaggtgccgatggagtgggtagttcctcgggaaattggcattgcgatacccaatggctgggggacagagtcatcaccaccagcacccgaacctgggccctgcccacctacaacaatcacctctacaagcaaatctccaacagcacatctggaggatcttcaaatgacaacgcctacttcggctacagcaccccctgggggtattttgacttcaacagattccactgccacttctcaccacgtgactggcagcgactcatcaacaacaactggggattccggcctaagcgactcaacttcaagctcttcaacattcaggtcaaagaggttacggacaacaatggagtcaagaccatcgccaataaccttaccagcacggtccaggtcttcacggactcagactatcagctcccgtacgtgctcgggtcggctcacgagggctgcctcccgccgttcccagcggacgttttcatgattcctcagtacgggtatctgacgcttaatgatggaagccaggccgtgggtcgttcgtccttttactgcctggaatatttcccgtcgcaaatgctaagaacgggtaacaacttccagttcagctacgagtttgagaacgtacctttccatagcagctacgctcacagccaaagcctggaccgactaatgaatccactcatcgaccaatacttgtactatctctcaaagactattaacggttctggacagaatcaacaaacgctaaaattcagtgtggccggacccagcaacatggctgtccagggaagaaactacatacctggacccagctaccgacaacaacgtgtctcaaccactgtgactcaaaacaacaacagcgaatttgcttggcctggagcttcttcttgggctctcaatggacgtaatagcttgatgaatcctggacctgctatggccagccacaaagaaggagaggaccgtttctttcctttgtctggatctttaatttttggcaaacaaggaactggaagagacaacgtggatgcggacaaagtcatgataaccaacgaagaagaaattaaaactactaacccggtagcaacggagtcctatggacaagtggccacaaaccaccagagtgcccaagcacaggcgcagaccggctgggttcaaaaccaaggaatacttccgggtatggtttggcaggacagagatgtgtacctgcaaggacccatttgggccaaaattcctcacacggacggcaactttcacccttctccgctgatgggagggtttggaatgaagcacccgcctcctcagatcctcatcaaaaacacacctgtacctgcggatcctccaacggccttcaacaaggacaagctgaactctttcatcacccagtattctactggccaagtcagcgtggagatcgagtgggagctgcagaaggaaaacagcaagcgctggaacccggagatccagtacacttccaactattacaagtctaataatgttgaatttgctgttaatactgaaggtgtatatagtgaaccccgccccattggcaccagatacctgactcgtaatctgtaa

SEQ ID NO: 258 - protein, 534 aa, synthetic construct
MASGGGAPVADNNEGADGVGSSSGNWHCDTQWLGDRVITTSTRTWALPTYNNHLYKQISNSTSGGSSNDNAYFGYSTPWGYFDFNRFHCHFSPRDWQRLINNNWGFRPKRLNFKLFNIQVKEVTDNNGVKTIANNLTSTVQVFTDSDYQLPYVLGSAHEGCLPPFPADVFMIPQYGYLTLNDGSQAVGRSSFYCLEYFPSQMLRTGNNFQFSYEFENVPFHSSYAHSQSLDRLMNPLIDQYLYYLSKTINGSGQNQQTLKFSVAGPSNMAVQGRNYIPGPSYRQQRVSTTVTQNNNSEFAWPGASSWALNGRNSLMNPGPAMASHKEGEDRFFPLSGSLIFGKQGTGRDNVDADKVMITNEEEIKTTNPVATESYGQVATNHQSAQAQAQTGWVQNQGILPGMVWQDRDVYLQGPIWAKIPHTDGNFHPSPLMGGFGMKHPPPQILIKNTPVPADPPTAFNKDKLNSFITQYSTGQVSVEIEWELQKENSKRWNPEIQYTSNYYKSNNVEFAVNTEGVYSEPRPIGTRYLTRNL

SEQ ID NO: 259 - DNA, 2211 bp, synthetic construct
  source 1..2211: mol_type = other DNA
atggctgccgatggttatcttccagattggctcgaggacaaccttagtgaaggaattcgcgagtggtgggctttgaaacctggagcccctcaacccaaggcaaatcaacaacatcaagacaacgctcgaggtcttgtgcttccgggttacaaataccttggacccggcaacggactcgacaagggggagccggtcaacgcagcagacgcggcggccctcgagcacgacaaggcctacgaccagcagctcaaggccggagacaacccgtacctcaagtacaaccacgccgacgccgagttccaggagcggctcaaagaagatacgtcttttgggggcaacctcgggcgagcagtcttccaggccaaaaagaggcttcttgaacctcttggtctggttgaggaagcggctaagacggctcctggaaagaagaggcctgtagagcagtctcctcaggaaccggactcctccgcgggtattggcaaatcgggtgcacagcccgctaaaaagagactcaatttcggtcagactggcgacacagagtcagtcccagaccctcaaccaatcggagaacctcccgcagccccctcaggtgtgggatctcttacaatggcttcaggtggtggcgcaccagtggcagacaataacgaaggtgccgatggagtgggtagttcctcgggaaattggcattgcgattcccaatggctgggggacagagtcatcaccaccagcacccgaacctgggccctgcccacctacaacaatcacctctacaagcaaatctccaacagcacatctggaggatcttcaaatgacaacgcctacttcggctacagcaccccctgggggtattttgacttcaacagattccactgccacttctcaccacgtgagtggcagcgactcatcaacaacaactggggattccggcctaagcgactcaacttcaagctcttcaacattcaggtcaaagaggttacggacaacaatggagtcaagaccatcgccaataaccttaccagcacggtccaggtcttcacggactcagactatcagctcccgtacgtgctcgggtcggctcacgagggctgcctcccgccgttcccagcggacgttttcatgattcctcagtacgggtatctgacgcttaatgatggaagccaggccgtgggtcgttcgtccttttactgcctggaatatttcccgtcgcaaatgctaagaacgggtaacaacttccagttcagctacgagtttgagaacgtacctttccatagcagctacgctcacagccaaagcctggaccgactaatgaatccactcatcgaccaatacttgtactatctctcaaagactattaacggttctggacagaatcaacaaacgctaaaattcagtgtggccggacccagcaacatggctgtccagggaagaaactacatacctggacccagctaccgacaacaacgtgtctcaaccactgtgactcaaaacaacaacagcgaatttgcttggcctggagcttcttcttgggctctcaatggacgtaatagcttgatgaatcctggacctgctatggccagccacaaagaaggagaggaccgtttctttcctttgtctggatctttaatttttggcaaacaaggaactggaagagacaacgtggatgcggacaaagtcatgataaccaacgaagaagaaattaaaactactaacccggtagcaacggagtcctatggacaagtggccacaaaccaccagagtgcccaagcacaggcgcagaccggctgggttcaaaaccaaggaatacttccgggtatggtttggcaggacagagatgtgtacctgcaaggacccatttgggccaaaattcctcacacggacggcaactttcacccttctccgctgatgggagggtttggaatgaagcacccgcctcctcagatcctcatcaaaaacacacctgtacctgcggatcctccaacggccttcaacaaggacaagctgaactctttcatcacccagtattctactggccaagtcagcgtggagatcgagtgggagctgcagaaggaaaacagcaagcgctggaacccggagatccagtacacttccaactattacaagtctaataatgttgaatttgctgttaatactgaaggtgtatatagtgaaccccgccccattggcaccagatacctgactcgtaatctgtaa

SEQ ID NO: 260 - protein, 736 aa, synthetic construct
MAADGYLPDWLEDNLSEGIREWWALKPGAPQPKANQQHQDNARGLVLPGYKYLGPGNGLDKGEPVNAADAAALEHDKAYDQQLKAGDNPYLKYNHADAEFQERLKEDTSFGGNLGRAVFQAKKRLLEPLGLVEEAAKTAPGKKRPVEQSPQEPDSSAGIGKSGAQPAKKRLNFGQTGDTESVPDPQPIGEPPAAPSGVGSLTMASGGGAPVADNNEGADGVGSSSGNWHCDSQWLGDRVITTSTRTWALPTYNNHLYKQISNSTSGGSSNDNAYFGYSTPWGYFDFNRFHCHFSPREWQRLINNNWGFRPKRLNFKLFNIQVKEVTDNNGVKTIANNLTSTVQVFTDSDYQLPYVLGSAHEGCLPPFPADVFMIPQYGYLTLNDGSQAVGRSSFYCLEYFPSQMLRTGNNFQFSYEFENVPFHSSYAHSQSLDRLMNPLIDQYLYYLSKTINGSGQNQQTLKFSVAGPSNMAVQGRNYIPGPSYRQQRVSTTVTQNNNSEFAWPGASSWALNGRNSLMNPGPAMASHKEGEDRFFPLSGSLIFGKQGTGRDNVDADKVMITNEEEIKTTNPVATESYGQVATNHQSAQAQAQTGWVQNQGILPGMVWQDRDVYLQGPIWAKIPHTDGNFHPSPLMGGFGMKHPPPQILIKNTPVPADPPTAFNKDKLNSFITQYSTGQVSVEIEWELQKENSKRWNPEIQYTSNYYKSNNVEFAVNTEGVYSEPRPIGTRYLTRNL

SEQ ID NO: 261 - DNA, 1800 bp, synthetic construct
  source 1..1800: mol_type = other DNA
acggctcctggaaagaagaggcctgtagagcagtctcctcaggaaccggactcctccgcgggtattggcaaatcgggtgcacagcccgctaaaaagagactcaatttcggtcagactggcgacacagagtcagtcccagaccctcaaccaatcggagaacctcccgcagccccctcaggtgtgggatctcttacaatggcttcaggtggtggcgcaccagtggcagacaataacgaaggtgccgatggagtgggtagttcctcgggaaattggcattgcgattcccaatggctgggggacagagtcatcaccaccagcacccgaacctgggccctgcccacctacaacaatcacctctacaagcaaatctccaacagcacatctggaggatcttcaaatgacaacgcctacttcggctacagcaccccctgggggtattttgacttcaacagattccactgccacttctcaccacgtgagtggcagcgactcatcaacaacaactggggattccggcctaagcgactcaacttcaagctcttcaacattcaggtcaaagaggttacggacaacaatggagtcaagaccatcgccaataaccttaccagcacggtccaggtcttcacggactcagactatcagctcccgtacgtgctcgggtcggctcacgagggctgcctcccgccgttcccagcggacgttttcatgattcctcagtacgggtatctgacgcttaatgatggaagccaggccgtgggtcgttcgtccttttactgcctggaatatttcccgtcgcaaatgctaagaacgggtaacaacttccagttcagctacgagtttgagaacgtacctttccatagcagctacgctcacagccaaagcctggaccgactaatgaatccactcatcgaccaatacttgtactatctctcaaagactattaacggttctggacagaatcaacaaacgctaaaattcagtgtggccggacccagcaacatggctgtccagggaagaaactacatacctggacccagctaccgacaacaacgtgtctcaaccactgtgactcaaaacaacaacagcgaatttgcttggcctggagcttcttcttgggctctcaatggacgtaatagcttgatgaatcctggacctgctatggccagccacaaagaaggagaggaccgtttctttcctttgtctggatctttaatttttggcaaacaaggaactggaagagacaacgtggatgcggacaaagtcatgataaccaacgaagaagaaattaaaactactaacccggtagcaacggagtcctatggacaagtggccacaaaccaccagagtgcccaagcacaggcgcagaccggctgggttcaaaaccaaggaatacttccgggtatggtttggcaggacagagatgtgtacctgcaaggacccatttgggccaaaattcctcacacggacggcaactttcacccttctccgctgatgggagggtttggaatgaagcacccgcctcctcagatcctcatcaaaaacacacctgtacctgcggatcctccaacggccttcaacaaggacaagctgaactctttcatcacccagtattctactggccaagtcagcgtggagatcgagtgggagctgcagaaggaaaacagcaagcgctggaacccggagatccagtacacttccaactattacaagtctaataatgttgaatttgctgttaatactgaaggtgtatatagtgaaccccgccccattggcaccagatacctgactcgtaatctgtaa

SEQ ID NO: 262 - protein, 599 aa, synthetic construct
TAPGKKRPVEQSPQEPDSSAGIGKSGAQPAKKRLNFGQTGDTESVPDPQPIGEPPAAPSGVGSLTMASGGGAPVADNNEGADGVGSSSGNWHCDSQWLGDRVITTSTRTWALPTYNNHLYKQISNSTSGGSSNDNAYFGYSTPWGYFDFNRFHCHFSPREWQRLINNNWGFRPKRLNFKLFNIQVKEVTDNNGVKTIANNLTSTVQVFTDSDYQLPYVLGSAHEGCLPPFPADVFMIPQYGYLTLNDGSQAVGRSSFYCLEYFPSQMLRTGNNFQFSYEFENVPFHSSYAHSQSLDRLMNPLIDQYLYYLSKTINGSGQNQQTLKFSVAGPSNMAVQGRNYIPGPSYRQQRVSTTVTQNNNSEFAWPGASSWALNGRNSLMNPGPAMASHKEGEDRFFPLSGSLIFGKQGTGRDNVDADKVMITNEEEIKTTNPVATESYGQVATNHQSAQAQAQTGWVQNQGILPGMVWQDRDVYLQGPIWAKIPHTDGNFHPSPLMGGFGMKHPPPQILIKNTPVPADPPTAFNKDKLNSFITQYSTGQVSVEIEWELQKENSKRWNPEIQYTSNYYKSNNVEFAVNTEGVYSEPRPIGTRYLTRNL

SEQ ID NO: 263 - DNA, 1605 bp, synthetic construct
  source 1..1605: mol_type = other DNA
atggcttcaggtggtggcgcaccagtggcagacaataacgaaggtgccgatggagtgggtagttcctcgggaaattggcattgcgattcccaatggctgggggacagagtcatcaccaccagcacccgaacctgggccctgcccacctacaacaatcacctctacaagcaaatctccaacagcacatctggaggatcttcaaatgacaacgcctacttcggctacagcaccccctgggggtattttgacttcaacagattccactgccacttctcaccacgtgagtggcagcgactcatcaacaacaactggggattccggcctaagcgactcaacttcaagctcttcaacattcaggtcaaagaggttacggacaacaatggagtcaagaccatcgccaataaccttaccagcacggtccaggtcttcacggactcagactatcagctcccgtacgtgctcgggtcggctcacgagggctgcctcccgccgttcccagcggacgttttcatgattcctcagtacgggtatctgacgcttaatgatggaagccaggccgtgggtcgttcgtccttttactgcctggaatatttcccgtcgcaaatgctaagaacgggtaacaacttccagttcagctacgagtttgagaacgtacctttccatagcagctacgctcacagccaaagcctggaccgactaatgaatccactcatcgaccaatacttgtactatctctcaaagactattaacggttctggacagaatcaacaaacgctaaaattcagtgtggccggacccagcaacatggctgtccagggaagaaactacatacctggacccagctaccgacaacaacgtgtctcaaccactgtgactcaaaacaacaacagcgaatttgcttggcctggagcttcttcttgggctctcaatggacgtaatagcttgatgaatcctggacctgctatggccagccacaaagaaggagaggaccgtttctttcctttgtctggatctttaatttttggcaaacaaggaactggaagagacaacgtggatgcggacaaagtcatgataaccaacgaagaagaaattaaaactactaacccggtagcaacggagtcctatggacaagtggccacaaaccaccagagtgcccaagcacaggcgcagaccggctgggttcaaaaccaaggaatacttccgggtatggtttggcaggacagagatgtgtacctgcaaggacccatttgggccaaaattcctcacacggacggcaactttcacccttctccgctgatgggagggtttggaatgaagcacccgcctcctcagatcctcatcaaaaacacacctgtacctgcggatcctccaacggccttcaacaaggacaagctgaactctttcatcacccagtattctactggccaagtcagcgtggagatcgagtgggagctgcagaaggaaaacagcaagcgctggaacccggagatccagtacacttccaactattacaagtctaataatgttgaatttgctgttaatactgaaggtgtatatagtgaaccccgccccattggcaccagatacctgactcgtaatctgtaa

SEQ ID NO: 264 - protein, 534 aa, synthetic construct
MASGGGAPVADNNEGADGVGSSSGNWHCDSQWLGDRVITTSTRTWALPTYNNHLYKQISNSTSGGSSNDNAYFGYSTPWGYFDFNRFHCHFSPREWQRLINNNWGFRPKRLNFKLFNIQVKEVTDNNGVKTIANNLTSTVQVFTDSDYQLPYVLGSAHEGCLPPFPADVFMIPQYGYLTLNDGSQAVGRSSFYCLEYFPSQMLRTGNNFQFSYEFENVPFHSSYAHSQSLDRLMNPLIDQYLYYLSKTINGSGQNQQTLKFSVAGPSNMAVQGRNYIPGPSYRQQRVSTTVTQNNNSEFAWPGASSWALNGRNSLMNPGPAMASHKEGEDRFFPLSGSLIFGKQGTGRDNVDADKVMITNEEEIKTTNPVATESYGQVATNHQSAQAQAQTGWVQNQGILPGMVWQDRDVYLQGPIWAKIPHTDGNFHPSPLMGGFGMKHPPPQILIKNTPVPADPPTAFNKDKLNSFITQYSTGQVSVEIEWELQKENSKRWNPEIQYTSNYYKSNNVEFAVNTEGVYSEPRPIGTRYLTRNL

SEQ ID NO: 265 - DNA, 2211 bp, synthetic construct
  source 1..2211: mol_type = other DNA
atggctgccgatggttatcttccagattggctcgaggacaaccttagtgaaggaattcgcgagtggtgggctttgaaacctggagcccctcaacccaaggcaaatcaacaacatcaagacaacgctcgaggtcttgtgcttccgggttacaaataccttggacccggcaacggactcgacaagggggagccggtcaacgcagcagacgcggcggccctcgagcacgacaaggcctacgaccagcagctcaaggccggagacaacccgtacctcaagtacaaccacgccgacgccgagttccaggagcggctcaaagaagatacgtcttttgggggcaacctcgggcgagcagtcttccaggccaaaaagaggcttcttgaacctcttggtctggttgaggaagcggctaagacggctcctggaaagaagaggcctgtagagcagtctcctcaggaaccggactcctccgcgggtattggcaaatcgggtgcacagcccgctaaaaagagactcaatttcggtcagactggcgacacagagtcagtcccagaccctcaaccaatcggagaacctcccgcagccccctcaggtgtgggatctcttacaatggcttcaggtggtggcgcaccagtggcagacaataacgaaggtgccgatggagtgggtagttcctcgggaaattggcattgcgattcccaatggctgggggacagagtcatcaccaccagcacccgaacctgggccctgcccacctacaacaatcacctctacaagcaaatctccaacagcacatctggaggatcttcaaatgacaacgcctacttcggctacagcaccccctgggggtattttgacttcaacagattccactgccacttctcaccacgtgactggcagcgactcatcaacaacaactggggattccggcctaagcgactcaacttcaagctcttcaacattcaggtcaaagaggttacggacaacaatggagtcaagaccatcgccaataaccttaccagcacggtccaggtcttcacggactcagactatcagctcccgtacgtgctcgggtcggctcacgagggctgcctcccgccgttcccagcggacgttttcatgattcctcagtacgggtatctgacgcttaatgatggaagccaggccgtgggtcgttcgtccttttactgcctggaatatttcccgtcgcaaatgctaagaacgggtaacaacttccagttcagctacgagtttgagaacgtacctttccatagcagctacgctcacagccaaagcctggaccgactaatgaatccactcatcgaccaatacttgtactatctctcaaagactattaacggttctggacagaatcaacaaacgctaaaattcagtgtggccggacccagcaacatggctgtccagggaagaaactacatacctggacccagctaccgacaacaacgtgtctcaaccactgtgactcaaaacaacaacagcgaatttgcttggcctggagcttcttcttgggctctcaatggacgtaatagcttgatgaatcctggacctgctatggccagccacaaagaaggagaggaccgtttctttcctttgtctggatctttaatttttggcaaacaaggaactggaagagacaacgtggatgcggacaaagtcatgataaccaacgaagaagaaattaaaactactaacccggtagcaacggagtcctatggacaagtggccacaaaccaccagagtgcccaagcacaggcgcagaccggctgggttcaaaaccaaggaatacttccgggtatggtttggcaggacagagatgtgtacctgcaaggacccatttgggccaaaattcctcacacggacggcaactttcacccttctccgctgatgggagggtttggaatgaagcacccgcctcctcagatcctcatcaaaaacacacctgtacctgcggatcctccaacggccttcaacaaggacaagctgaactctttcatcacccagtattctactggccaagtcagcgtggagatcgagtgggagctgcagaaggaaaacactaagcgctggaacccggagatccagtacacttccaactattacaagtctaataatgttgaatttgctgttaatactgaaggtgtatatagtgaaccccgccccattggcaccagatacctgactcgtaatctgtaa

SEQ ID NO: 266 - protein, 736 aa, synthetic construct
MAADGYLPDWLEDNLSEGIREWWALKPGAPQPKANQQHQDNARGLVLPGYKYLGPGNGLDKGEPVNAADAAALEHDKAYDQQLKAGDNPYLKYNHADAEFQERLKEDTSFGGNLGRAVFQAKKRLLEPLGLVEEAAKTAPGKKRPVEQSPQEPDSSAGIGKSGAQPAKKRLNFGQTGDTESVPDPQPIGEPPAAPSGVGSLTMASGGGAPVADNNEGADGVGSSSGNWHCDSQWLGDRVITTSTRTWALPTYNNHLYKQISNSTSGGSSNDNAYFGYSTPWGYFDFNRFHCHFSPRDWQRLINNNWGFRPKRLNFKLFNIQVKEVTDNNGVKTIANNLTSTVQVFTDSDYQLPYVLGSAHEGCLPPFPADVFMIPQYGYLTLNDGSQAVGRSSFYCLEYFPSQMLRTGNNFQFSYEFENVPFHSSYAHSQSLDRLMNPLIDQYLYYLSKTINGSGQNQQTLKFSVAGPSNMAVQGRNYIPGPSYRQQRVSTTVTQNNNSEFAWPGASSWALNGRNSLMNPGPAMASHKEGEDRFFPLSGSLIFGKQGTGRDNVDADKVMITNEEEIKTTNPVATESYGQVATNHQSAQAQAQTGWVQNQGILPGMVWQDRDVYLQGPIWAKIPHTDGNFHPSPLMGGFGMKHPPPQILIKNTPVPADPPTAFNKDKLNSFITQYSTGQVSVEIEWELQKENTKRWNPEIQYTSNYYKSNNVEFAVNTEGVYSEPRPIGTRYLTRNL

SEQ ID NO: 267 - DNA, 1800 bp, synthetic construct
  source 1..1800: mol_type = other DNA
acggctcctggaaagaagaggcctgtagagcagtctcctcaggaaccggactcctccgcgggtattggcaaatcgggtgcacagcccgctaaaaagagactcaatttcggtcagactggcgacacagagtcagtcccagaccctcaaccaatcggagaacctcccgcagccccctcaggtgtgggatctcttacaatggcttcaggtggtggcgcaccagtggcagacaataacgaaggtgccgatggagtgggtagttcctcgggaaattggcattgcgattcccaatggctgggggacagagtcatcaccaccagcacccgaacctgggccctgcccacctacaacaatcacctctacaagcaaatctccaacagcacatctggaggatcttcaaatgacaacgcctacttcggctacagcaccccctgggggtattttgacttcaacagattccactgccacttctcaccacgtgactggcagcgactcatcaacaacaactggggattccggcctaagcgactcaacttcaagctcttcaacattcaggtcaaagaggttacggacaacaatggagtcaagaccatcgccaataaccttaccagcacggtccaggtcttcacggactcagactatcagctcccgtacgtgctcgggtcggctcacgagggctgcctcccgccgttcccagcggacgttttcatgattcctcagtacgggtatctgacgcttaatgatggaagccaggccgtgggtcgttcgtccttttactgcctggaatatttcccgtcgcaaatgctaagaacgggtaacaacttccagttcagctacgagtttgagaacgtacctttccatagcagctacgctcacagccaaagcctggaccgactaatgaatccactcatcgaccaatacttgtactatctctcaaagactattaacggttctggacagaatcaacaaacgctaaaattcagtgtggccggacccagcaacatggctgtccagggaagaaactacatacctggacccagctaccgacaacaacgtgtctcaaccactgtgactcaaaacaacaacagcgaatttgcttggcctggagcttcttcttgggctctcaatggacgtaatagcttgatgaatcctggacctgctatggccagccacaaagaaggagaggaccgtttctttcctttgtctggatctttaatttttggcaaacaaggaactggaagagacaacgtggatgcggacaaagtcatgataaccaacgaagaagaaattaaaactactaacccggtagcaacggagtcctatggacaagtggccacaaaccaccagagtgcccaagcacaggcgcagaccggctgggttcaaaaccaaggaatacttccgggtatggtttggcaggacagagatgtgtacctgcaaggacccatttgggccaaaattcctcacacggacggcaactttcacccttctccgctgatgggagggtttggaatgaagcacccgcctcctcagatcctcatcaaaaacacacctgtacctgcggatcctccaacggccttcaacaaggacaagctgaactctttcatcacccagtattctactggccaagtcagcgtggagatcgagtgggagctgcagaaggaaaacactaagcgctggaacccggagatccagtacacttccaactattacaagtctaataatgttgaatttgctgttaatactgaaggtgtatatagtgaaccccgccccattggcaccagatacctgactcgtaatctgtaa

SEQ ID NO: 268 - protein, 599 aa, synthetic construct
TAPGKKRPVEQSPQEPDSSAGIGKSGAQPAKKRLNFGQTGDTESVPDPQPIGEPPAAPSGVGSLTMASGGGAPVADNNEGADGVGSSSGNWHCDSQWLGDRVITTSTRTWALPTYNNHLYKQISNSTSGGSSNDNAYFGYSTPWGYFDFNRFHCHFSPRDWQRLINNNWGFRPKRLNFKLFNIQVKEVTDNNGVKTIANNLTSTVQVFTDSDYQLPYVLGSAHEGCLPPFPADVFMIPQYGYLTLNDGSQAVGRSSFYCLEYFPSQMLRTGNNFQFSYEFENVPFHSSYAHSQSLDRLMNPLIDQYLYYLSKTINGSGQNQQTLKFSVAGPSNMAVQGRNYIPGPSYRQQRVSTTVTQNNNSEFAWPGASSWALNGRNSLMNPGPAMASHKEGEDRFFPLSGSLIFGKQGTGRDNVDADKVMITNEEEIKTTNPVATESYGQVATNHQSAQAQAQTGWVQNQGILPGMVWQDRDVYLQGPIWAKIPHTDGNFHPSPLMGGFGMKHPPPQILIKNTPVPADPPTAFNKDKLNSFITQYSTGQVSVEIEWELQKENTKRWNPEIQYTSNYYKSNNVEFAVNTEGVYSEPRPIGTRYLTRNL

SEQ ID NO: 269 - DNA, 1605 bp, synthetic construct
  source 1..1605: mol_type = other DNA
atggcttcaggtggtggcgcaccagtggcagacaataacgaaggtgccgatggagtgggtagttcctcgggaaattggcattgcgattcccaatggctgggggacagagtcatcaccaccagcacccgaacctgggccctgcccacctacaacaatcacctctacaagcaaatctccaacagcacatctggaggatcttcaaatgacaacgcctacttcggctacagcaccccctgggggtattttgacttcaacagattccactgccacttctcaccacgtgactggcagcgactcatcaacaacaactggggattccggcctaagcgactcaacttcaagctcttcaacattcaggtcaaagaggttacggacaacaatggagtcaagaccatcgccaataaccttaccagcacggtccaggtcttcacggactcagactatcagctcccgtacgtgctcgggtcggctcacgagggctgcctcccgccgttcccagcggacgttttcatgattcctcagtacgggtatctgacgcttaatgatggaagccaggccgtgggtcgttcgtccttttactgcctggaatatttcccgtcgcaaatgctaagaacgggtaacaacttccagttcagctacgagtttgagaacgtacctttccatagcagctacgctcacagccaaagcctggaccgactaatgaatccactcatcgaccaatacttgtactatctctcaaagactattaacggttctggacagaatcaacaaacgctaaaattcagtgtggccggacccagcaacatggctgtccagggaagaaactacatacctggacccagctaccgacaacaacgtgtctcaaccactgtgactcaaaacaacaacagcgaatttgcttggcctggagcttcttcttgggctctcaatggacgtaatagcttgatgaatcctggacctgctatggccagccacaaagaaggagaggaccgtttctttcctttgtctggatctttaatttttggcaaacaaggaactggaagagacaacgtggatgcggacaaagtcatgataaccaacgaagaagaaattaaaactactaacccggtagcaacggagtcctatggacaagtggccacaaaccaccagagtgcccaagcacaggcgcagaccggctgggttcaaaaccaaggaatacttccgggtatggtttggcaggacagagatgtgtacctgcaaggacccatttgggccaaaattcctcacacggacggcaactttcacccttctccgctgatgggagggtttggaatgaagcacccgcctcctcagatcctcatcaaaaacacacctgtacctgcggatcctccaacggccttcaacaaggacaagctgaactctttcatcacccagtattctactggccaagtcagcgtggagatcgagtgggagctgcagaaggaaaacactaagcgctggaacccggagatccagtacacttccaactattacaagtctaataatgttgaatttgctgttaatactgaaggtgtatatagtgaaccccgccccattggcaccagatacctgactcgtaatctgtaa

SEQ ID NO: 270 - protein, 534 aa, synthetic construct
MASGGGAPVADNNEGADGVGSSSGNWHCDSQWLGDRVITTSTRTWALPTYNNHLYKQISNSTSGGSSNDNAYFGYSTPWGYFDFNRFHCHFSPRDWQRLINNNWGFRPKRLNFKLFNIQVKEVTDNNGVKTIANNLTSTVQVFTDSDYQLPYVLGSAHEGCLPPFPADVFMIPQYGYLTLNDGSQAVGRSSFYCLEYFPSQMLRTGNNFQFSYEFENVPFHSSYAHSQSLDRLMNPLIDQYLYYLSKTINGSGQNQQTLKFSVAGPSNMAVQGRNYIPGPSYRQQRVSTTVTQNNNSEFAWPGASSWALNGRNSLMNPGPAMASHKEGEDRFFPLSGSLIFGKQGTGRDNVDADKVMITNEEEIKTTNPVATESYGQVATNHQSAQAQAQTGWVQNQGILPGMVWQDRDVYLQGPIWAKIPHTDGNFHPSPLMGGFGMKHPPPQILIKNTPVPADPPTAFNKDKLNSFITQYSTGQVSVEIEWELQKENTKRWNPEIQYTSNYYKSNNVEFAVNTEGVYSEPRPIGTRYLTRNL

SEQ ID NO: 271 - DNA, 2211 bp, synthetic construct
  source 1..2211: mol_type = other DNA
atggctgccgatggttatcttccagattggctcgaggacaaccttagtgaaggaattcgcgagtggtgggctttgaaacctggagcccctcaacccaaggcaaatcaacaacatcaagacaacgctcgaggtcttgtgcttccgggttacaaataccttggacccggcaacggactcgacaagggggagccggtcaacgcagcagacgcggcggccctcgagcacgacaaggcctacgaccagcagctcaaggccggagacaacccgtacctcaagtacaaccacgccgacgccgagttccaggagcggctcaaagaagatacgtcttttgggggcaacctcgggcgagcagtcttccaggccaaaaagaggcttcttgaacctcttggtctggttgaggaagcggctaagacggctcctggaaagaagaggcctgtagagcagtctcctcaggaaccggactcctccgcgggtattggcaaatcgggtgcacagcccgctaaaaagagactcaatttcggtcagactggcgacacagagtcagtcccagaccctcaaccaatcggagaacctcccgcagccccctcaggtgtgggatctcttacaatggcttcaggtggtggcgcaccagtggcagacaataacgaaggtgccgatggagtgggtagttcctcgggaaattggcattgcgattcccaatggctgggggacagagtcatcaccaccagcacccgaacctgggccctgcccacctacaacaatcacctctacaagcaaatctccaacagcacatctggaggatcttcaaatgacaacgcctacttcggctacagcaccccctgggggtattttgacttcaacagattccactgccacttctcaccacgtgactggcagcgactcatcaacaacaactggggattccggcctaagcgactcaacttcaagctcttcaacattcaggtcaaagaggttacggacaacaatggagtcaagaccatcgccaataaccttaccagcacggtccaggtcttcacggactcagactatcagctcccgtacgtgctcgggtcggctcacgagggctgcctcccgccgttcccagcggacgttttcatgattcctcagtacgggtatctgacgcttaatgatggaagccaggccgtgggtcgttcgtccttttactgcctggaatatttcccgtcgcaaatgctaagaacgggtaacaacttccagttcagctacgagtttgagaacgtacctttccatagcagctacgctcacagccaaagcctgtatcgactaatgaatccactcatcgaccaatacttgtactatctctcaaagactattaacggttctggacagaatcaacaaacgctaaaattcagtgtggccggacccagcaacatggctgtccagggaagaaactacatacctggacccagctaccgacaacaacgtgtctcaaccactgtgactcaaaacaacaacagcgaatttgcttggcctggagcttcttcttgggctctcaatggacgtaatagcttgatgaatcctggacctgctatggccagccacaaagaaggagaggaccgtttctttcctttgtctggatctttaatttttggcaaacaaggaactggaagagacaacgtggatgcggacaaagtcatgataaccaacgaagaagaaattaaaactactaacccggtagcaacggagtcctatggacaagtggccacaaaccaccagagtgcccaagcacaggcgcagaccggctgggttcaaaaccaaggaatacttccgggtatggtttggcaggacagagatgtgtacctgcaaggacccatttgggccaaaattcctcacacggacggcaactttcacccttctccgctgatgggagggtttggaatgaagcacccgcctcctcagatcctcatcaaaaacacacctgtacctgcggatcctccaacggccttcaacaaggacaagctgaactctttcatcacccagtattctactggccaagtcagcgtggagatcgagtgggagctgcagaaggaaaacagcaagcgctggaacccggagatccagtacacttccaactattacaagtctaataatgttgaatttgctgttaatactgaaggtgtatatagtgaaccccgccccattggcaccagatacctgactcgtaatctgtaa

SEQ ID NO: 272 - protein, 736 aa, synthetic construct
MAADGYLPDWLEDNLSEGIREWWALKPGAPQPKANQQHQDNARGLVLPGYKYLGPGNGLDKGEPVNAADAAALEHDKAYDQQLKAGDNPYLKYNHADAEFQERLKEDTSFGGNLGRAVFQAKKRLLEPLGLVEEAAKTAPGKKRPVEQSPQEPDSSAGIGKSGAQPAKKRLNFGQTGDTESVPDPQPIGEPPAAPSGVGSLTMASGGGAPVADNNEGADGVGSSSGNWHCDSQWLGDRVITTSTRTWALPTYNNHLYKQISNSTSGGSSNDNAYFGYSTPWGYFDFNRFHCHFSPRDWQRLINNNWGFRPKRLNFKLFNIQVKEVTDNNGVKTIANNLTSTVQVFTDSDYQLPYVLGSAHEGCLPPFPADVFMIPQYGYLTLNDGSQAVGRSSFYCLEYFPSQMLRTGNNFQFSYEFENVPFHSSYAHSQSLYRLMNPLIDQYLYYLSKTINGSGQNQQTLKFSVAGPSNMAVQGRNYIPGPSYRQQRVSTTVTQNNNSEFAWPGASSWALNGRNSLMNPGPAMASHKEGEDRFFPLSGSLIFGKQGTGRDNVDADKVMITNEEEIKTTNPVATESYGQVATNHQSAQAQAQTGWVQNQGILPGMVWQDRDVYLQGPIWAKIPHTDGNFHPSPLMGGFGMKHPPPQILIKNTPVPADPPTAFNKDKLNSFITQYSTGQVSVEIEWELQKENSKRWNPEIQYTSNYYKSNNVEFAVNTEGVYSEPRPIGTRYLTRNL

SEQ ID NO: 273 - DNA, 1800 bp, synthetic construct
  source 1..1800: mol_type = other DNA
acggctcctggaaagaagaggcctgtagagcagtctcctcaggaaccggactcctccgcgggtattggcaaatcgggtgcacagcccgctaaaaagagactcaatttcggtcagactggcgacacagagtcagtcccagaccctcaaccaatcggagaacctcccgcagccccctcaggtgtgggatctcttacaatggcttcaggtggtggcgcaccagtggcagacaataacgaaggtgccgatggagtgggtagttcctcgggaaattggcattgcgattcccaatggctgggggacagagtcatcaccaccagcacccgaacctgggccctgcccacctacaacaatcacctctacaagcaaatctccaacagcacatctggaggatcttcaaatgacaacgcctacttcggctacagcaccccctgggggtattttgacttcaacagattccactgccacttctcaccacgtgactggcagcgactcatcaacaacaactggggattccggcctaagcgactcaacttcaagctcttcaacattcaggtcaaagaggttacggacaacaatggagtcaagaccatcgccaataaccttaccagcacggtccaggtcttcacggactcagactatcagctcccgtacgtgctcgggtcggctcacgagggctgcctcccgccgttcccagcggacgttttcatgattcctcagtacgggtatctgacgcttaatgatggaagccaggccgtgggtcgttcgtccttttactgcctggaatatttcccgtcgcaaatgctaagaacgggtaacaacttccagttcagctacgagtttgagaacgtacctttccatagcagctacgctcacagccaaagcctgtatcgactaatgaatccactcatcgaccaatacttgtactatctctcaaagactattaacggttctggacagaatcaacaaacgctaaaattcagtgtggccggacccagcaacatggctgtccagggaagaaactacatacctggacccagctaccgacaacaacgtgtctcaaccactgtgactcaaaacaacaacagcgaatttgcttggcctggagcttcttcttgggctctcaatggacgtaatagcttgatgaatcctggacctgctatggccagccacaaagaaggagaggaccgtttctttcctttgtctggatctttaatttttggcaaacaaggaactggaagagacaacgtggatgcggacaaagtcatgataaccaacgaagaagaaattaaaactactaacccggtagcaacggagtcctatggacaagtggccacaaaccaccagagtgcccaagcacaggcgcagaccggctgggttcaaaaccaaggaatacttccgggtatggtttggcaggacagagatgtgtacctgcaaggacccatttgggccaaaattcctcacacggacggcaactttcacccttctccgctgatgggagggtttggaatgaagcacccgcctcctcagatcctcatcaaaaacacacctgtacctgcggatcctccaacggccttcaacaaggacaagctgaactctttcatcacccagtattctactggccaagtcagcgtggagatcgagtgggagctgcagaaggaaaacagcaagcgctggaacccggagatccagtacacttccaactattacaagtctaataatgttgaatttgctgttaatactgaaggtgtatatagtgaaccccgccccattggcaccagatacctgactcgtaatctgtaa

SEQ ID NO: 274 - protein, 599 aa, synthetic construct
TAPGKKRPVEQSPQEPDSSAGIGKSGAQPAKKRLNFGQTGDTESVPDPQPIGEPPAAPSGVGSLTMASGGGAPVADNNEGADGVGSSSGNWHCDSQWLGDRVITTSTRTWALPTYNNHLYKQISNSTSGGSSNDNAYFGYSTPWGYFDFNRFHCHFSPRDWQRLINNNWGFRPKRLNFKLFNIQVKEVTDNNGVKTIANNLTSTVQVFTDSDYQLPYVLGSAHEGCLPPFPADVFMIPQYGYLTLNDGSQAVGRSSFYCLEYFPSQMLRTGNNFQFSYEFENVPFHSSYAHSQSLYRLMNPLIDQYLYYLSKTINGSGQNQQTLKFSVAGPSNMAVQGRNYIPGPSYRQQRVSTTVTQNNNSEFAWPGASSWALNGRNSLMNPGPAMASHKEGEDRFFPLSGSLIFGKQGTGRDNVDADKVMITNEEEIKTTNPVATESYGQVATNHQSAQAQAQTGWVQNQGILPGMVWQDRDVYLQGPIWAKIPHTDGNFHPSPLMGGFGMKHPPPQILIKNTPVPADPPTAFNKDKLNSFITQYSTGQVSVEIEWELQKENSKRWNPEIQYTSNYYKSNNVEFAVNTEGVYSEPRPIGTRYLTRNL

SEQ ID NO: 275 - DNA, 1605 bp, synthetic construct
  source 1..1605: mol_type = other DNA
atggcttcaggtggtggcgcaccagtggcagacaataacgaaggtgccgatggagtgggtagttcctcgggaaattggcattgcgattcccaatggctgggggacagagtcatcaccaccagcacccgaacctgggccctgcccacctacaacaatcacctctacaagcaaatctccaacagcacatctggaggatcttcaaatgacaacgcctacttcggctacagcaccccctgggggtattttgacttcaacagattccactgccacttctcaccacgtgactggcagcgactcatcaacaacaactggggattccggcctaagcgactcaacttcaagctcttcaacattcaggtcaaagaggttacggacaacaatggagtcaagaccatcgccaataaccttaccagcacggtccaggtcttcacggactcagactatcagctcccgtacgtgctcgggtcggctcacgagggctgcctcccgccgttcccagcggacgttttcatgattcctcagtacgggtatctgacgcttaatgatggaagccaggccgtgggtcgttcgtccttttactgcctggaatatttcccgtcgcaaatgctaagaacgggtaacaacttccagttcagctacgagtttgagaacgtacctttccatagcagctacgctcacagccaaagcctgtatcgactaatgaatccactcatcgaccaatacttgtactatctctcaaagactattaacggttctggacagaatcaacaaacgctaaaattcagtgtggccggacccagcaacatggctgtccagggaagaaactacatacctggacccagctaccgacaacaacgtgtctcaaccactgtgactcaaaacaacaacagcgaatttgcttggcctggagcttcttcttgggctctcaatggacgtaatagcttgatgaatcctggacctgctatggccagccacaaagaaggagaggaccgtttctttcctttgtctggatctttaatttttggcaaacaaggaactggaagagacaacgtggatgcggacaaagtcatgataaccaacgaagaagaaattaaaactactaacccggtagcaacggagtcctatggacaagtggccacaaaccaccagagtgcccaagcacaggcgcagaccggctgggttcaaaaccaaggaatacttccgggtatggtttggcaggacagagatgtgtacctgcaaggacccatttgggccaaaattcctcacacggacggcaactttcacccttctccgctgatgggagggtttggaatgaagcacccgcctcctcagatcctcatcaaaaacacacctgtacctgcggatcctccaacggccttcaacaaggacaagctgaactctttcatcacccagtattctactggccaagtcagcgtggagatcgagtgggagctgcagaaggaaaacagcaagcgctggaacccggagatccagtacacttccaactattacaagtctaataatgttgaatttgctgttaatactgaaggtgtatatagtgaaccccgccccattggcaccagatacctgactcgtaatctgtaa

SEQ ID NO: 276 - protein, 534 aa, synthetic construct
MASGGGAPVADNNEGADGVGSSSGNWHCDSQWLGDRVITTSTRTWALPTYNNHLYKQISNSTSGGSSNDNAYFGYSTPWGYFDFNRFHCHFSPRDWQRLINNNWGFRPKRLNFKLFNIQVKEVTDNNGVKTIANNLTSTVQVFTDSDYQLPYVLGSAHEGCLPPFPADVFMIPQYGYLTLNDGSQAVGRSSFYCLEYFPSQMLRTGNNFQFSYEFENVPFHSSYAHSQSLYRLMNPLIDQYLYYLSKTINGSGQNQQTLKFSVAGPSNMAVQGRNYIPGPSYRQQRVSTTVTQNNNSEFAWPGASSWALNGRNSLMNPGPAMASHKEGEDRFFPLSGSLIFGKQGTGRDNVDADKVMITNEEEIKTTNPVATESYGQVATNHQSAQAQAQTGWVQNQGILPGMVWQDRDVYLQGPIWAKIPHTDGNFHPSPLMGGFGMKHPPPQILIKNTPVPADPPTAFNKDKLNSFITQYSTGQVSVEIEWELQKENSKRWNPEIQYTSNYYKSNNVEFAVNTEGVYSEPRPIGTRYLTRNL

SEQ ID NO: 277 - DNA, 2211 bp, synthetic construct
  source 1..2211: mol_type = other DNA
atggctgccgatggttatcttccagattggctcgaggacaaccttagtgaaggaattcgcgagtggtgggctttgaaacctggagcccctcaacccaaggcaaatcaacaacatcaagacaacgctcgaggtcttgtgcttccgggttacaaataccttggacccggcaacggactcgacaagggggagccggtcaacgcagcagacgcggcggccctcgagcacgacaaggcctacgaccagcagctcaaggccggagacaacccgtacctcaagtacaaccacgccgacgccgagttccaggagcggctcaaagaagatacgtcttttgggggcaacctcgggcgagcagtcttccaggccaaaaagaggcttcttgaacctcttggtctggttgaggaagcggctaagacggctcctggaaagaagaggcctgtagagcagtctcctcaggaaccggactcctccgcgggtattggcaaatcgggtgcacagcccgctaaaaagagactcaatttcggtcagactggcgacacagagtcagtcccagaccctcaaccaatcggagaacctcccgcagccccctcaggtgtgggatctcttacaatggcttcaggtggtggcgcaccagtggcagacaataacgaaggtgccgatggagtgggtagttcctcgggaaattggcattgcgattcccaatggctgggggacagagtcatcaccaccagcacccgaacctgggccctgcccacctacaacaatcacctctacaagcaaatctccaacagcacatctggaggatcttcaaatgacaacgcctacttcggctacagcaccccctgggggtattttgacttcaacagattccactgccacttctcaccacgtgactggcagcgactcatcaacaacaactggggattccggcctaagcgactcaacttcaagctcttcaacattcaggtcaaagaggttacggacaacaatggagtcaagaccatcgccaataaccttaccagcacggtccaggtcttcacggactcagactatcagctcccgtacgtgctcgggtcggctcacgagggctgcctcccgccgttcccagcggacgttttcatgattcctcagtacgggtatctgacgcttaatgatggaagccaggccgtgggtcgttcgtccttttactgcctggaatatttcccgtcgcaaatgctaagaacgggtaacaacttccagttcagctacgagtttgagaacgtacctttccatagcagctacgctcacagccaaagcctggaccgactaatgaatccactcatcgaccaatacttgtactatctctcaaagactattaacggttctggacagaatcaacaaacgctaaaattcagtgtggccggacccagcaacatggctgtccagggaagaaactacatacctggacccagctaccgacaacaacgtgtctcaaccactgtgactcaaaacaacaacagcgaatttgcttggcctggagcttcttcttgggctctcaatggacgtaatagcttgatgaatcctggacctgctatggccagccacaaagaaggagaggaccgtttctttcctttgtctggatctttaatttttggcaaacaaggaactggaagagacaacgtggatgcggacaaagtcatgataaccaacgaagaagaaattaaaactactaacccggtagcaacggagtcctatggacaagtggccacaaaccaccagagtgcccaagcacaggcgcagaccggctgggttcaaaaccaaggaatacttccgggtatggtttggcaggacagagatgtgtacctgcaaggacccatttgggccaaaattcctcacctggacggcaactttcacccttctccgctgatgggagggtttggaatgaagcacccgcctcctcagatcctcatcaaaaacacacctgtacctgcggatcctccaacggccttcaacaaggacaagctgaactctttcatcacccagtattctactggccaagtcagcgtggagatcgagtgggagctgcagaaggaaaacagcaagcgctggaacccggagatccagtacacttccaactattacaagtctaataatgttgaatttgctgttaatactgaaggtgtatatagtgaaccccgccccattggcaccagatacctgactcgtaatctgtaa

SEQ ID NO: 278 - protein, 736 aa, synthetic construct
MAADGYLPDWLEDNLSEGIREWWALKPGAPQPKANQQHQDNARGLVLPGYKYLGPGNGLDKGEPVNAADAAALEHDKAYDQQLKAGDNPYLKYNHADAEFQERLKEDTSFGGNLGRAVFQAKKRLLEPLGLVEEAAKTAPGKKRPVEQSPQEPDSSAGIGKSGAQPAKKRLNFGQTGDTESVPDPQPIGEPPAAPSGVGSLTMASGGGAPVADNNEGADGVGSSSGNWHCDSQWLGDRVITTSTRTWALPTYNNHLYKQISNSTSGGSSNDNAYFGYSTPWGYFDFNRFHCHFSPRDWQRLINNNWGFRPKRLNFKLFNIQVKEVTDNNGVKTIANNLTSTVQVFTDSDYQLPYVLGSAHEGCLPPFPADVFMIPQYGYLTLNDGSQAVGRSSFYCLEYFPSQMLRTGNNFQFSYEFENVPFHSSYAHSQSLDRLMNPLIDQYLYYLSKTINGSGQNQQTLKFSVAGPSNMAVQGRNYIPGPSYRQQRVSTTVTQNNNSEFAWPGASSWALNGRNSLMNPGPAMASHKEGEDRFFPLSGSLIFGKQGTGRDNVDADKVMITNEEEIKTTNPVATESYGQVATNHQSAQAQAQTGWVQNQGILPGMVWQDRDVYLQGPIWAKIPHLDGNFHPSPLMGGFGMKHPPPQILIKNTPVPADPPTAFNKDKLNSFITQYSTGQVSVEIEWELQKENSKRWNPEIQYTSNYYKSNNVEFAVNTEGVYSEPRPIGTRYLTRNL

SEQ ID NO: 279 - DNA, 1800 bp, synthetic construct
  source 1..1800: mol_type = other DNA
acggctcctggaaagaagaggcctgtagagcagtctcctcaggaaccggactcctccgcgggtattggcaaatcgggtgcacagcccgctaaaaagagactcaatttcggtcagactggcgacacagagtcagtcccagaccctcaaccaatcggagaacctcccgcagccccctcaggtgtgggatctcttacaatggcttcaggtggtggcgcaccagtggcagacaataacgaaggtgccgatggagtgggtagttcctcgggaaattggcattgcgattcccaatggctgggggacagagtcatcaccaccagcacccgaacctgggccctgcccacctacaacaatcacctctacaagcaaatctccaacagcacatctggaggatcttcaaatgacaacgcctacttcggctacagcaccccctgggggtattttgacttcaacagattccactgccacttctcaccacgtgactggcagcgactcatcaacaacaactggggattccggcctaagcgactcaacttcaagctcttcaacattcaggtcaaagaggttacggacaacaatggagtcaagaccatcgccaataaccttaccagcacggtccaggtcttcacggactcagactatcagctcccgtacgtgctcgggtcggctcacgagggctgcctcccgccgttcccagcggacgttttcatgattcctcagtacgggtatctgacgcttaatgatggaagccaggccgtgggtcgttcgtccttttactgcctggaatatttcccgtcgcaaatgctaagaacgggtaacaacttccagttcagctacgagtttgagaacgtacctttccatagcagctacgctcacagccaaagcctggaccgactaatgaatccactcatcgaccaatacttgtactatctctcaaagactattaacggttctggacagaatcaacaaacgctaaaattcagtgtggccggacccagcaacatggctgtccagggaagaaactacatacctggacccagctaccgacaacaacgtgtctcaaccactgtgactcaaaacaacaacagcgaatttgcttggcctggagcttcttcttgggctctcaatggacgtaatagcttgatgaatcctggacctgctatggccagccacaaagaaggagaggaccgtttctttcctttgtctggatctttaatttttggcaaacaaggaactggaagagacaacgtggatgcggacaaagtcatgataaccaacgaagaagaaattaaaactactaacccggtagcaacggagtcctatggacaagtggccacaaaccaccagagtgcccaagcacaggcgcagaccggctgggttcaaaaccaaggaatacttccgggtatggtttggcaggacagagatgtgtacctgcaaggacccatttgggccaaaattcctcacctggacggcaactttcacccttctccgctgatgggagggtttggaatgaagcacccgcctcctcagatcctcatcaaaaacacacctgtacctgcggatcctccaacggccttcaacaaggacaagctgaactctttcatcacccagtattctactggccaagtcagcgtggagatcgagtgggagctgcagaaggaaaacagcaagcgctggaacccggagatccagtacacttccaactattacaagtctaataatgttgaatttgctgttaatactgaaggtgtatatagtgaaccccgccccattggcaccagatacctgactcgtaatctgtaa

SEQ ID NO: 280 - protein, 599 aa, synthetic construct
TAPGKKRPVEQSPQEPDSSAGIGKSGAQPAKKRLNFGQTGDTESVPDPQPIGEPPAAPSGVGSLTMASGGGAPVADNNEGADGVGSSSGNWHCDSQWLGDRVITTSTRTWALPTYNNHLYKQISNSTSGGSSNDNAYFGYSTPWGYFDFNRFHCHFSPRDWQRLINNNWGFRPKRLNFKLFNIQVKEVTDNNGVKTIANNLTSTVQVFTDSDYQLPYVLGSAHEGCLPPFPADVFMIPQYGYLTLNDGSQAVGRSSFYCLEYFPSQMLRTGNNFQFSYEFENVPFHSSYAHSQSLDRLMNPLIDQYLYYLSKTINGSGQNQQTLKFSVAGPSNMAVQGRNYIPGPSYRQQRVSTTVTQNNNSEFAWPGASSWALNGRNSLMNPGPAMASHKEGEDRFFPLSGSLIFGKQGTGRDNVDADKVMITNEEEIKTTNPVATESYGQVATNHQSAQAQAQTGWVQNQGILPGMVWQDRDVYLQGPIWAKIPHLDGNFHPSPLMGGFGMKHPPPQILIKNTPVPADPPTAFNKDKLNSFITQYSTGQVSVEIEWELQKENSKRWNPEIQYTSNYYKSNNVEFAVNTEGVYSEPRPIGTRYLTRNL

SEQ ID NO: 281 - DNA, 1605 bp, synthetic construct
  source 1..1605: mol_type = other DNA
atggcttcaggtggtggcgcaccagtggcagacaataacgaaggtgccgatggagtgggtagttcctcgggaaattggcattgcgattcccaatggctgggggacagagtcatcaccaccagcacccgaacctgggccctgcccacctacaacaatcacctctacaagcaaatctccaacagcacatctggaggatcttcaaatgacaacgcctacttcggctacagcaccccctgggggtattttgacttcaacagattccactgccacttctcaccacgtgactggcagcgactcatcaacaacaactggggattccggcctaagcgactcaacttcaagctcttcaacattcaggtcaaagaggttacggacaacaatggagtcaagaccatcgccaataaccttaccagcacggtccaggtcttcacggactcagactatcagctcccgtacgtgctcgggtcggctcacgagggctgcctcccgccgttcccagcggacgttttcatgattcctcagtacgggtatctgacgcttaatgatggaagccaggccgtgggtcgttcgtccttttactgcctggaatatttcccgtcgcaaatgctaagaacgggtaacaacttccagttcagctacgagtttgagaacgtacctttccatagcagctacgctcacagccaaagcctggaccgactaatgaatccactcatcgaccaatacttgtactatctctcaaagactattaacggttctggacagaatcaacaaacgctaaaattcagtgtggccggacccagcaacatggctgtccagggaagaaactacatacctggacccagctaccgacaacaacgtgtctcaaccactgtgactcaaaacaacaacagcgaatttgcttggcctggagcttcttcttgggctctcaatggacgtaatagcttgatgaatcctggacctgctatggccagccacaaagaaggagaggaccgtttctttcctttgtctggatctttaatttttggcaaacaaggaactggaagagacaacgtggatgcggacaaagtcatgataaccaacgaagaagaaattaaaactactaacccggtagcaacggagtcctatggacaagtggccacaaaccaccagagtgcccaagcacaggcgcagaccggctgggttcaaaaccaaggaatacttccgggtatggtttggcaggacagagatgtgtacctgcaaggacccatttgggccaaaattcctcacctggacggcaactttcacccttctccgctgatgggagggtttggaatgaagcacccgcctcctcagatcctcatcaaaaacacacctgtacctgcggatcctccaacggccttcaacaaggacaagctgaactctttcatcacccagtattctactggccaagtcagcgtggagatcgagtgggagctgcagaaggaaaacagcaagcgctggaacccggagatccagtacacttccaactattacaagtctaataatgttgaatttgctgttaatactgaaggtgtatatagtgaaccccgccccattggcaccagatacctgactcgtaatctgtaa

SEQ ID NO: 282 - protein, 534 aa, synthetic construct
MASGGGAPVADNNEGADGVGSSSGNWHCDSQWLGDRVITTSTRTWALPTYNNHLYKQISNSTSGGSSNDNAYFGYSTPWGYFDFNRFHCHFSPRDWQRLINNNWGFRPKRLNFKLFNIQVKEVTDNNGVKTIANNLTSTVQVFTDSDYQLPYVLGSAHEGCLPPFPADVFMIPQYGYLTLNDGSQAVGRSSFYCLEYFPSQMLRTGNNFQFSYEFENVPFHSSYAHSQSLDRLMNPLIDQYLYYLSKTINGSGQNQQTLKFSVAGPSNMAVQGRNYIPGPSYRQQRVSTTVTQNNNSEFAWPGASSWALNGRNSLMNPGPAMASHKEGEDRFFPLSGSLIFGKQGTGRDNVDADKVMITNEEEIKTTNPVATESYGQVATNHQSAQAQAQTGWVQNQGILPGMVWQDRDVYLQGPIWAKIPHLDGNFHPSPLMGGFGMKHPPPQILIKNTPVPADPPTAFNKDKLNSFITQYSTGQVSVEIEWELQKENSKRWNPEIQYTSNYYKSNNVEFAVNTEGVYSEPRPIGTRYLTRNL

SEQ ID NO: 283 - DNA, 2211 bp, synthetic construct
  source 1..2211: mol_type = other DNA
atggctgccgatggttatcttccagattggctcgaggacaaccttagtgaaggaattcgcgagtggtgggctttgaaacctggagcccctcaacccaaggcaaatcaacaacatcaagacaacgctcgaggtcttgtgcttccgggttacaaataccttggacccggcaacggactcgacaagggggagccggtcaacgcagcagacgcggcggccctcgagcacgacaaggcctacgaccagcagctcaaggccggagacaacccgtacctcaagtacaaccacgccgacgccgagttccaggagcggctcaaagaagatacgtcttttgggggcaacctcgggcgagcagtcttccaggccaaaaagaggcttcttgaacctcttggtctggttgaggaagcggctaagacggctcctggaaagaagaggcctgtagagcagtctcctcaggaaccggactcctccgcgggtattggcaaatcgggtgcacagcccgctaaaaagagactcaatttcggtcagactggcgacacagagtcagtcccagaccctcaaccaatcggagaacctcccgcagccccctcaggtgtgggatctcttacaatggcttcaggtggtggcgcaccagtggcagacaataacgaaggtgccgatggagtgggtagttcctcgggaaattggcattgcgattcccaatggctgggggacagagtcatcaccaccagcacccgaacctgggccctgcccacctacaacaatcacctctacaagcaaatctccaacagcacatctggaggatcttcaaatgacaacgcctacttcggctacagcaccccctgggggtattttgacttcaacagattccactgccacttctcaccacgtgactggcagcgactcatcaacaacaactggggattccggcctaagcgactcaacttcaagctcttcaacattcaggtcaaagaggttacggacaacaatggagtcaagaccatcgccaataaccttaccagcacggtccaggtcttcacggactcagactatcagctcccgtacgtgctcgggtcggctcacgagggctgcctcccgccgttcccagcggacgttttcatgattcctcagtacgggtatctgacgcttaatgatggaagccaggccgtgggtcgttcgtccttttactgcctggaatatttcccgtcgcaaatgctaagaacgggtaacaacttccagttcagctacgagtttgagaacgtacctttccatagcagctacgctcacagccaaagcctggaccgactaatgaatccactcatcgaccaatacttgtactatctctcaaagactattaacggttctggacagaatcaacaaacgctaaaattcagtgtggccggacccagcaacatggctgtccagggaagaaactacatacctggacccagctaccgacaacaacgtgtctcaaccactgtgactcaaaacaacaacagcgaatttgcttggcctggagcttcttcttgggctctcaatggacgtaatagcttgatgaatcctggacctgctatggccagccacaaagaaggagaggaccgtttctttcctttgtctggatctttaatttttggcaaacaaggaactggaagagacaacgtggatgcggacaaagtcatgataaccaacgaagaagaaattaaaactactaacccggtagcaacggagtcctatggacaagtggccacaaaccaccagagtgcccaagcacaggcgcagaccggctgggttcaaaaccaaggaatacttccgggtatggtttggcaggacagagatgtgtacctgcaaggacccatttgggccaaaattcctcacgttgacggcaactttcacccttctccgctgatgggagggtttggaatgaagcacccgcctcctcagatcctcatcaaaaacacacctgtacctgcggatcctccaacggccttcaacaaggacaagctgaactctttcatcacccagtattctactggccaagtcagcgtggagatcgagtgggagctgcagaaggaaaacagcaagcgctggaacccggagatccagtacacttccaactattacaagtctaataatgttgaatttgctgttaatactgaaggtgtatatagtgaaccccgccccattggcaccagatacctgactcgtaatctgtaa

SEQ ID NO: 284 - protein, 736 aa, synthetic construct
MAADGYLPDWLEDNLSEGIREWWALKPGAPQPKANQQHQDNARGLVLPGYKYLGPGNGLDKGEPVNAADAAALEHDKAYDQQLKAGDNPYLKYNHADAEFQERLKEDTSFGGNLGRAVFQAKKRLLEPLGLVEEAAKTAPGKKRPVEQSPQEPDSSAGIGKSGAQPAKKRLNFGQTGDTESVPDPQPIGEPPAAPSGVGSLTMASGGGAPVADNNEGADGVGSSSGNWHCDSQWLGDRVITTSTRTWALPTYNNHLYKQISNSTSGGSSNDNAYFGYSTPWGYFDFNRFHCHFSPRDWQRLINNNWGFRPKRLNFKLFNIQVKEVTDNNGVKTIANNLTSTVQVFTDSDYQLPYVLGSAHEGCLPPFPADVFMIPQYGYLTLNDGSQAVGRSSFYCLEYFPSQMLRTGNNFQFSYEFENVPFHSSYAHSQSLDRLMNPLIDQYLYYLSKTINGSGQNQQTLKFSVAGPSNMAVQGRNYIPGPSYRQQRVSTTVTQNNNSEFAWPGASSWALNGRNSLMNPGPAMASHKEGEDRFFPLSGSLIFGKQGTGRDNVDADKVMITNEEEIKTTNPVATESYGQVATNHQSAQAQAQTGWVQNQGILPGMVWQDRDVYLQGPIWAKIPHVDGNFHPSPLMGGFGMKHPPPQILIKNTPVPADPPTAFNKDKLNSFITQYSTGQVSVEIEWELQKENSKRWNPEIQYTSNYYKSNNVEFAVNTEGVYSEPRPIGTRYLTRNL

SEQ ID NO: 285 - DNA, 1800 bp, synthetic construct
  source 1..1800: mol_type = other DNA
acggctcctggaaagaagaggcctgtagagcagtctcctcaggaaccggactcctccgcgggtattggcaaatcgggtgcacagcccgctaaaaagagactcaatttcggtcagactggcgacacagagtcagtcccagaccctcaaccaatcggagaacctcccgcagccccctcaggtgtgggatctcttacaatggcttcaggtggtggcgcaccagtggcagacaataacgaaggtgccgatggagtgggtagttcctcgggaaattggcattgcgattcccaatggctgggggacagagtcatcaccaccagcacccgaacctgggccctgcccacctacaacaatcacctctacaagcaaatctccaacagcacatctggaggatcttcaaatgacaacgcctacttcggctacagcaccccctgggggtattttgacttcaacagattccactgccacttctcaccacgtgactggcagcgactcatcaacaacaactggggattccggcctaagcgactcaacttcaagctcttcaacattcaggtcaaagaggttacggacaacaatggagtcaagaccatcgccaataaccttaccagcacggtccaggtcttcacggactcagactatcagctcccgtacgtgctcgggtcggctcacgagggctgcctcccgccgttcccagcggacgttttcatgattcctcagtacgggtatctgacgcttaatgatggaagccaggccgtgggtcgttcgtccttttactgcctggaatatttcccgtcgcaaatgctaagaacgggtaacaacttccagttcagctacgagtttgagaacgtacctttccatagcagctacgctcacagccaaagcctggaccgactaatgaatccactcatcgaccaatacttgtactatctctcaaagactattaacggttctggacagaatcaacaaacgctaaaattcagtgtggccggacccagcaacatggctgtccagggaagaaactacatacctggacccagctaccgacaacaacgtgtctcaaccactgtgactcaaaacaacaacagcgaatttgcttggcctggagcttcttcttgggctctcaatggacgtaatagcttgatgaatcctggacctgctatggccagccacaaagaaggagaggaccgtttctttcctttgtctggatctttaatttttggcaaacaaggaactggaagagacaacgtggatgcggacaaagtcatgataaccaacgaagaagaaattaaaactactaacccggtagcaacggagtcctatggacaagtggccacaaaccaccagagtgcccaagcacaggcgcagaccggctgggttcaaaaccaaggaatacttccgggtatggtttggcaggacagagatgtgtacctgcaaggacccatttgggccaaaattcctcacgttgacggcaactttcacccttctccgctgatgggagggtttggaatgaagcacccgcctcctcagatcctcatcaaaaacacacctgtacctgcggatcctccaacggccttcaacaaggacaagctgaactctttcatcacccagtattctactggccaagtcagcgtggagatcgagtgggagctgcagaaggaaaacagcaagcgctggaacccggagatccagtacacttccaactattacaagtctaataatgttgaatttgctgttaatactgaaggtgtatatagtgaaccccgccccattggcaccagatacctgactcgtaatctgtaa

SEQ ID NO: 286 - protein, 599 aa, synthetic construct
TAPGKKRPVEQSPQEPDSSAGIGKSGAQPAKKRLNFGQTGDTESVPDPQPIGEPPAAPSGVGSLTMASGGGAPVADNNEGADGVGSSSGNWHCDSQWLGDRVITTSTRTWALPTYNNHLYKQISNSTSGGSSNDNAYFGYSTPWGYFDFNRFHCHFSPRDWQRLINNNWGFRPKRLNFKLFNIQVKEVTDNNGVKTIANNLTSTVQVFTDSDYQLPYVLGSAHEGCLPPFPADVFMIPQYGYLTLNDGSQAVGRSSFYCLEYFPSQMLRTGNNFQFSYEFENVPFHSSYAHSQSLDRLMNPLIDQYLYYLSKTINGSGQNQQTLKFSVAGPSNMAVQGRNYIPGPSYRQQRVSTTVTQNNNSEFAWPGASSWALNGRNSLMNPGPAMASHKEGEDRFFPLSGSLIFGKQGTGRDNVDADKVMITNEEEIKTTNPVATESYGQVATNHQSAQAQAQTGWVQNQGILPGMVWQDRDVYLQGPIWAKIPHVDGNFHPSPLMGGFGMKHPPPQILIKNTPVPADPPTAFNKDKLNSFITQYSTGQVSVEIEWELQKENSKRWNPEIQYTSNYYKSNNVEFAVNTEGVYSEPRPIGTRYLTRNL

SEQ ID NO: 287 - DNA, 1605 bp, synthetic construct
  source 1..1605: mol_type = other DNA
atggcttcaggtggtggcgcaccagtggcagacaataacgaaggtgccgatggagtgggtagttcctcgggaaattggcattgcgattcccaatggctgggggacagagtcatcaccaccagcacccgaacctgggccctgcccacctacaacaatcacctctacaagcaaatctccaacagcacatctggaggatcttcaaatgacaacgcctacttcggctacagcaccccctgggggtattttgacttcaacagattccactgccacttctcaccacgtgactggcagcgactcatcaacaacaactggggattccggcctaagcgactcaacttcaagctcttcaacattcaggtcaaagaggttacggacaacaatggagtcaagaccatcgccaataaccttaccagcacggtccaggtcttcacggactcagactatcagctcccgtacgtgctcgggtcggctcacgagggctgcctcccgccgttcccagcggacgttttcatgattcctcagtacgggtatctgacgcttaatgatggaagccaggccgtgggtcgttcgtccttttactgcctggaatatttcccgtcgcaaatgctaagaacgggtaacaacttccagttcagctacgagtttgagaacgtacctttccatagcagctacgctcacagccaaagcctggaccgactaatgaatccactcatcgaccaatacttgtactatctctcaaagactattaacggttctggacagaatcaacaaacgctaaaattcagtgtggccggacccagcaacatggctgtccagggaagaaactacatacctggacccagctaccgacaacaacgtgtctcaaccactgtgactcaaaacaacaacagcgaatttgcttggcctggagcttcttcttgggctctcaatggacgtaatagcttgatgaatcctggacctgctatggccagccacaaagaaggagaggaccgtttctttcctttgtctggatctttaatttttggcaaacaaggaactggaagagacaacgtggatgcggacaaagtcatgataaccaacgaagaagaaattaaaactactaacccggtagcaacggagtcctatggacaagtggccacaaaccaccagagtgcccaagcacaggcgcagaccggctgggttcaaaaccaaggaatacttccgggtatggtttggcaggacagagatgtgtacctgcaaggacccatttgggccaaaattcctcacgttgacggcaactttcacccttctccgctgatgggagggtttggaatgaagcacccgcctcctcagatcctcatcaaaaacacacctgtacctgcggatcctccaacggccttcaacaaggacaagctgaactctttcatcacccagtattctactggccaagtcagcgtggagatcgagtgggagctgcagaaggaaaacagcaagcgctggaacccggagatccagtacacttccaactattacaagtctaataatgttgaatttgctgttaatactgaaggtgtatatagtgaaccccgccccattggcaccagatacctgactcgtaatctgtaa

SEQ ID NO: 288 - protein, 534 aa, synthetic construct
MASGGGAPVADNNEGADGVGSSSGNWHCDSQWLGDRVITTSTRTWALPTYNNHLYKQISNSTSGGSSNDNAYFGYSTPWGYFDFNRFHCHFSPRDWQRLINNNWGFRPKRLNFKLFNIQVKEVTDNNGVKTIANNLTSTVQVFTDSDYQLPYVLGSAHEGCLPPFPADVFMIPQYGYLTLNDGSQAVGRSSFYCLEYFPSQMLRTGNNFQFSYEFENVPFHSSYAHSQSLDRLMNPLIDQYLYYLSKTINGSGQNQQTLKFSVAGPSNMAVQGRNYIPGPSYRQQRVSTTVTQNNNSEFAWPGASSWALNGRNSLMNPGPAMASHKEGEDRFFPLSGSLIFGKQGTGRDNVDADKVMITNEEEIKTTNPVATESYGQVATNHQSAQAQAQTGWVQNQGILPGMVWQDRDVYLQGPIWAKIPHVDGNFHPSPLMGGFGMKHPPPQILIKNTPVPADPPTAFNKDKLNSFITQYSTGQVSVEIEWELQKENSKRWNPEIQYTSNYYKSNNVEFAVNTEGVYSEPRPIGTRYLTRNL

SEQ ID NO: 289 - DNA, 2211 bp, synthetic construct
  source 1..2211: mol_type = other DNA
atggctgccgatggttatcttccagattggctcgaggacaaccttagtgaaggaattcgcgagtggtgggctttgaaacctggagcccctcaacccaaggcaaatcaacaacatcaagacaacgctcgaggtcttgtgcttccgggttacaaataccttggacccggcaacggactcgacaagggggagccggtcaacgcagcagacgcggcggccctcgagcacgacaaggcctacgaccagcagctcaaggccggagacaacccgtacctcaagtacaaccacgccgacgccgagttccaggagcggctcaaagaagatacgtcttttgggggcaacctcgggcgagcagtcttccaggccaaaaagaggcttcttgaacctcttggtctggttgaggaagcggctaagacggctcctggaaagaagaggcctgtagagcagtctcctcaggaaccggactcctccgcgggtattggcaaatcgggtgcacagcccgctaaaaagagactcaatttcggtcagactggcgacacagagtcagtcccagaccctcaaccaatcggagaacctcccgcagccccctcaggtgtgggatctcttacaatggcttcaggtggtggcgcaccagtggcagacaataacgaaggtgccgatggagtgggtagttcctcgggaaattggcattgcgattcccaatggctgggggacagagtcatcaccaccagcacccgaacctgggccctgcccacctacaacaatcacctctacaagcaaatctccaacagcacatctggaggatcttcaaatgacaacgcctacttcggctacagcaccccctgggggtattttgacttcaacagattccactgccacttctcaccacgtgactggcagcgactcatcaacaacaactggggattccggcctaagcgactcaacttcaagctcttcaacattcaggtcaaagaggttacggacaacaatggagtcaagaccatcgccaataaccttaccagcacggtccaggtcttcacggactcagactatcagctcccgtacgtgctcgggtcggctcacgagggctgcctcccgccgttcccagcggacgttttcatgattcctcagtacgggtatctgacgcttaatgatggaagccaggccgtgggtcgttcgtccttttactgcctggaatatttcccgtcgcaaatgctaagaacgggtaacaacttccagttcagctacgagtttgagaacgtacctttccatagcagctacgctcacagccaaagcctggaccgactaatgaatccactcatcgaccaatacttgtactatctctcaaagactattaacggttctggacagaatcaacaaacgctaaaattcagtgtggccggacccagcaacatggctgtccagggaagaaactacatacctggacccagctaccgacaacaacgtgtctcaaccactgtgactcaaaacaacaacagcgaatttgcttggcctggagcttcttcttgggctctcaatggacgtaatagcttgatgaatcctggacctgctatggccagccacaaagaaggagaggaccgtttctttcctttgtctggatctttaatttttggcaaacaaggaactggaagagacaacgtggatgcggacaaagtcatgataaccaacgaagaagaaattaaaactactaacccggtagcaacggagtcctatggacaagtggccacaaaccaccagagtgcccaagcacaggcgcagaccggctgggttcaaaaccaaggaatacttccgggtatggtttggcaggacagagatgtgtacctgcaaggacccatttgggccaaaattcctcacacggacggcaactttcacccttctccgctgatgggagggtttggaatgaagcacccgcctcctcagatcctcatcaaaaacacacctgtacctgcggatcctccaacggccttcaacaaggacaagctgaactctttcatcacccagtattctactggccaagtcagcgtggagatcgagtgggagctgcagaaggaagccagcaagcgctggaacccggagatccagtacacttccaactattacaagtctaataatgttgaatttgctgttaatactgaaggtgtatatagtgaaccccgccccattggcaccagatacctgactcgtaatctgtaa

SEQ ID NO: 290 - protein, 736 aa, synthetic construct
MAADGYLPDWLEDNLSEGIREWWALKPGAPQPKANQQHQDNARGLVLPGYKYLGPGNGLDKGEPVNAADAAALEHDKAYDQQLKAGDNPYLKYNHADAEFQERLKEDTSFGGNLGRAVFQAKKRLLEPLGLVEEAAKTAPGKKRPVEQSPQEPDSSAGIGKSGAQPAKKRLNFGQTGDTESVPDPQPIGEPPAAPSGVGSLTMASGGGAPVADNNEGADGVGSSSGNWHCDSQWLGDRVITTSTRTWALPTYNNHLYKQISNSTSGGSSNDNAYFGYSTPWGYFDFNRFHCHFSPRDWQRLINNNWGFRPKRLNFKLFNIQVKEVTDNNGVKTIANNLTSTVQVFTDSDYQLPYVLGSAHEGCLPPFPADVFMIPQYGYLTLNDGSQAVGRSSFYCLEYFPSQMLRTGNNFQFSYEFENVPFHSSYAHSQSLDRLMNPLIDQYLYYLSKTINGSGQNQQTLKFSVAGPSNMAVQGRNYIPGPSYRQQRVSTTVTQNNNSEFAWPGASSWALNGRNSLMNPGPAMASHKEGEDRFFPLSGSLIFGKQGTGRDNVDADKVMITNEEEIKTTNPVATESYGQVATNHQSAQAQAQTGWVQNQGILPGMVWQDRDVYLQGPIWAKIPHTDGNFHPSPLMGGFGMKHPPPQILIKNTPVPADPPTAFNKDKLNSFITQYSTGQVSVEIEWELQKEASKRWNPEIQYTSNYYKSNNVEFAVNTEGVYSEPRPIGTRYLTRNL

SEQ ID NO: 291 - DNA, 1800 bp, synthetic construct
  source 1..1800: mol_type = other DNA
acggctcctggaaagaagaggcctgtagagcagtctcctcaggaaccggactcctccgcgggtattggcaaatcgggtgcacagcccgctaaaaagagactcaatttcggtcagactggcgacacagagtcagtcccagaccctcaaccaatcggagaacctcccgcagccccctcaggtgtgggatctcttacaatggcttcaggtggtggcgcaccagtggcagacaataacgaaggtgccgatggagtgggtagttcctcgggaaattggcattgcgattcccaatggctgggggacagagtcatcaccaccagcacccgaacctgggccctgcccacctacaacaatcacctctacaagcaaatctccaacagcacatctggaggatcttcaaatgacaacgcctacttcggctacagcaccccctgggggtattttgacttcaacagattccactgccacttctcaccacgtgactggcagcgactcatcaacaacaactggggattccggcctaagcgactcaacttcaagctcttcaacattcaggtcaaagaggttacggacaacaatggagtcaagaccatcgccaataaccttaccagcacggtccaggtcttcacggactcagactatcagctcccgtacgtgctcgggtcggctcacgagggctgcctcccgccgttcccagcggacgttttcatgattcctcagtacgggtatctgacgcttaatgatggaagccaggccgtgggtcgttcgtccttttactgcctggaatatttcccgtcgcaaatgctaagaacgggtaacaacttccagttcagctacgagtttgagaacgtacctttccatagcagctacgctcacagccaaagcctggaccgactaatgaatccactcatcgaccaatacttgtactatctctcaaagactattaacggttctggacagaatcaacaaacgctaaaattcagtgtggccggacccagcaacatggctgtccagggaagaaactacatacctggacccagctaccgacaacaacgtgtctcaaccactgtgactcaaaacaacaacagcgaatttgcttggcctggagcttcttcttgggctctcaatggacgtaatagcttgatgaatcctggacctgctatggccagccacaaagaaggagaggaccgtttctttcctttgtctggatctttaatttttggcaaacaaggaactggaagagacaacgtggatgcggacaaagtcatgataaccaacgaagaagaaattaaaactactaacccggtagcaacggagtcctatggacaagtggccacaaaccaccagagtgcccaagcacaggcgcagaccggctgggttcaaaaccaaggaatacttccgggtatggtttggcaggacagagatgtgtacctgcaaggacccatttgggccaaaattcctcacacggacggcaactttcacccttctccgctgatgggagggtttggaatgaagcacccgcctcctcagatcctcatcaaaaacacacctgtacctgcggatcctccaacggccttcaacaaggacaagctgaactctttcatcacccagtattctactggccaagtcagcgtggagatcgagtgggagctgcagaaggaagccagcaagcgctggaacccggagatccagtacacttccaactattacaagtctaataatgttgaatttgctgttaatactgaaggtgtatatagtgaaccccgccccattggcaccagatacctgactcgtaatctgtaa

SEQ ID NO: 292 - protein, 599 aa, synthetic construct
TAPGKKRPVEQSPQEPDSSAGIGKSGAQPAKKRLNFGQTGDTESVPDPQPIGEPPAAPSGVGSLTMASGGGAPVADNNEGADGVGSSSGNWHCDSQWLGDRVITTSTRTWALPTYNNHLYKQISNSTSGGSSNDNAYFGYSTPWGYFDFNRFHCHFSPRDWQRLINNNWGFRPKRLNFKLFNIQVKEVTDNNGVKTIANNLTSTVQVFTDSDYQLPYVLGSAHEGCLPPFPADVFMIPQYGYLTLNDGSQAVGRSSFYCLEYFPSQMLRTGNNFQFSYEFENVPFHSSYAHSQSLDRLMNPLIDQYLYYLSKTINGSGQNQQTLKFSVAGPSNMAVQGRNYIPGPSYRQQRVSTTVTQNNNSEFAWPGASSWALNGRNSLMNPGPAMASHKEGEDRFFPLSGSLIFGKQGTGRDNVDADKVMITNEEEIKTTNPVATESYGQVATNHQSAQAQAQTGWVQNQGILPGMVWQDRDVYLQGPIWAKIPHTDGNFHPSPLMGGFGMKHPPPQILIKNTPVPADPPTAFNKDKLNSFITQYSTGQVSVEIEWELQKEASKRWNPEIQYTSNYYKSNNVEFAVNTEGVYSEPRPIGTRYLTRNL

SEQ ID NO: 293 - DNA, 1605 bp, synthetic construct
  source 1..1605: mol_type = other DNA
atggcttcaggtggtggcgcaccagtggcagacaataacgaaggtgccgatggagtgggtagttcctcgggaaattggcattgcgattcccaatggctgggggacagagtcatcaccaccagcacccgaacctgggccctgcccacctacaacaatcacctctacaagcaaatctccaacagcacatctggaggatcttcaaatgacaacgcctacttcggctacagcaccccctgggggtattttgacttcaacagattccactgccacttctcaccacgtgactggcagcgactcatcaacaacaactggggattccggcctaagcgactcaacttcaagctcttcaacattcaggtcaaagaggttacggacaacaatggagtcaagaccatcgccaataaccttaccagcacggtccaggtcttcacggactcagactatcagctcccgtacgtgctcgggtcggctcacgagggctgcctcccgccgttcccagcggacgttttcatgattcctcagtacgggtatctgacgcttaatgatggaagccaggccgtgggtcgttcgtccttttactgcctggaatatttcccgtcgcaaatgctaagaacgggtaacaacttccagttcagctacgagtttgagaacgtacctttccatagcagctacgctcacagccaaagcctggaccgactaatgaatccactcatcgaccaatacttgtactatctctcaaagactattaacggttctggacagaatcaacaaacgctaaaattcagtgtggccggacccagcaacatggctgtccagggaagaaactacatacctggacccagctaccgacaacaacgtgtctcaaccactgtgactcaaaacaacaacagcgaatttgcttggcctggagcttcttcttgggctctcaatggacgtaatagcttgatgaatcctggacctgctatggccagccacaaagaaggagaggaccgtttctttcctttgtctggatctttaatttttggcaaacaaggaactggaagagacaacgtggatgcggacaaagtcatgataaccaacgaagaagaaattaaaactactaacccggtagcaacggagtcctatggacaagtggccacaaaccaccagagtgcccaagcacaggcgcagaccggctgggttcaaaaccaaggaatacttccgggtatggtttggcaggacagagatgtgtacctgcaaggacccatttgggccaaaattcctcacacggacggcaactttcacccttctccgctgatgggagggtttggaatgaagcacccgcctcctcagatcctcatcaaaaacacacctgtacctgcggatcctccaacggccttcaacaaggacaagctgaactctttcatcacccagtattctactggccaagtcagcgtggagatcgagtgggagctgcagaaggaagccagcaagcgctggaacccggagatccagtacacttccaactattacaagtctaataatgttgaatttgctgttaatactgaaggtgtatatagtgaaccccgccccattggcaccagatacctgactcgtaatctgtaa

SEQ ID NO: 294 - protein, 534 aa, synthetic construct
MASGGGAPVADNNEGADGVGSSSGNWHCDSQWLGDRVITTSTRTWALPTYNNHLYKQISNSTSGGSSNDNAYFGYSTPWGYFDFNRFHCHFSPRDWQRLINNNWGFRPKRLNFKLFNIQVKEVTDNNGVKTIANNLTSTVQVFTDSDYQLPYVLGSAHEGCLPPFPADVFMIPQYGYLTLNDGSQAVGRSSFYCLEYFPSQMLRTGNNFQFSYEFENVPFHSSYAHSQSLDRLMNPLIDQYLYYLSKTINGSGQNQQTLKFSVAGPSNMAVQGRNYIPGPSYRQQRVSTTVTQNNNSEFAWPGASSWALNGRNSLMNPGPAMASHKEGEDRFFPLSGSLIFGKQGTGRDNVDADKVMITNEEEIKTTNPVATESYGQVATNHQSAQAQAQTGWVQNQGILPGMVWQDRDVYLQGPIWAKIPHTDGNFHPSPLMGGFGMKHPPPQILIKNTPVPADPPTAFNKDKLNSFITQYSTGQVSVEIEWELQKEASKRWNPEIQYTSNYYKSNNVEFAVNTEGVYSEPRPIGTRYLTRNL

SEQ ID NO: 295 - DNA, 2211 bp, synthetic construct
  source 1..2211: mol_type = other DNA
atggctgccgatggttatcttccagattggctcgaggacaaccttagtgaaggaattcgcgagtggtgggctttgaaacctggagcccctcaacccaaggcaaatcaacaacatcaagacaacgctcgaggtcttgtgcttccgggttacaaataccttggacccggcaacggactcgacaagggggagccggtcaacgcagcagacgcggcggccctcgagcacgacaaggcctacgaccagcagctcaaggccggagacaacccgtacctcaagtacaaccacgccgacgccgagttccaggagcggctcaaagaagatacgtcttttgggggcaacctcgggcgagcagtcttccaggccaaaaagaggcttcttgaacctcttggtctggttgaggaagcggctaagacggctcctggaaagaagaggcctgtagagcagtctcctcaggaaccggactcctccgcgggtattggcaaatcgggtgcacagcccgctaaaaagagactcaatttcggtcagactggcgacacagagtcagtcccagaccctcaaccaatcggagaacctcccgcagccccctcaggtgtgggatctcttacaatggcttcaggtggtggcgcaccagtggcagacaataacgaaggtgccgatggagtgggtagttcctcgggaaattggcattgcgattcccaatggctgggggacagagtcatcaccaccagcacccgaacctgggccctgcccacctacaacaatcacctctacaagcaaatctccaacagcacatctggaggatcttcaaatgacaacgcctacttcggctacagcaccccctgggggtattttgacttcaacagattccactgccacttctcaccacgtgactggcagcgactcatcaacaacaactggggattccggcctaagcgactcaacttcaagctcttcaacattcaggtcaaagaggttacggacaacaatggagtcaagaccatcgccaataaccttaccagcacggtccaggtcttcacggactcagactatcagctcccgtacgtgctcgggtcggctcacgagggctgcctcccgccgttcccagcggacgttttcatgattcctcagtacgggtatctgacgcttaatgatggaagccaggccgtgggtcgttcgtccttttacgtgctggaatatttcccgtcgcaaatgctaagaacgggtaacaacttccagttcagctacgagtttgagaacgtacctttccatagcagctacgctcacagccaaagcctggaccgactaatgaatccactcatcgaccaatacttgtactatctctcaaagactattaacggttctggacagaatcaacaaacgctaaaattcagtgtggccggacccagcaacatggctgtccagggaagaaactacatacctggacccagctaccgacaacaacgtgtctcaaccactgtgactcaaaacaacaacagcgaatttgcttggcctggagcttcttcttgggctctcaatggacgtaatagcttgatgaatcctggacctgctatggccagccacaaagaaggagaggaccgtttctttcctttgtctggatctttaatttttggcaaacaaggaactggaagagacaacgtggatgcggacaaagtcatgataaccaacgaagaagaaattaaaactactaacccggtagcaacggagtcctatggacaagtggccacaaaccaccagagtgcccaagcacaggcgcagaccggctgggttcaaaaccaaggaatacttccgggtatggtttggcaggacagagatgtgtacctgcaaggacccatttgggccaaaattcctcacacggacggcaactttcacccttctccgctgatgggagggtttggaatgaagcacccgcctcctcagatcctcatcaaaaacacacctgtacctgcggatcctccaacggccttcaacaaggacaagctgaactctttcatcacccagtattctactggccaagtcagcgtggagatcgagtgggagctgcagaaggaaaacagcaagcgctggaacccggagatccagtacacttccaactattacaagtctaataatgttgaatttgctgttaatactgaaggtgtatatagtgaaccccgccccattggcaccagatacctgactcgtaatctgtaa

SEQ ID NO: 296 - protein, 736 aa, synthetic construct
MAADGYLPDWLEDNLSEGIREWWALKPGAPQPKANQQHQDNARGLVLPGYKYLGPGNGLDKGEPVNAADAAALEHDKAYDQQLKAGDNPYLKYNHADAEFQERLKEDTSFGGNLGRAVFQAKKRLLEPLGLVEEAAKTAPGKKRPVEQSPQEPDSSAGIGKSGAQPAKKRLNFGQTGDTESVPDPQPIGEPPAAPSGVGSLTMASGGGAPVADNNEGADGVGSSSGNWHCDSQWLGDRVITTSTRTWALPTYNNHLYKQISNSTSGGSSNDNAYFGYSTPWGYFDFNRFHCHFSPRDWQRLINNNWGFRPKRLNFKLFNIQVKEVTDNNGVKTIANNLTSTVQVFTDSDYQLPYVLGSAHEGCLPPFPADVFMIPQYGYLTLNDGSQAVGRSSFYVLEYFPSQMLRTGNNFQFSYEFENVPFHSSYAHSQSLDRLMNPLIDQYLYYLSKTINGSGQNQQTLKFSVAGPSNMAVQGRNYIPGPSYRQQRVSTTVTQNNNSEFAWPGASSWALNGRNSLMNPGPAMASHKEGEDRFFPLSGSLIFGKQGTGRDNVDADKVMITNEEEIKTTNPVATESYGQVATNHQSAQAQAQTGWVQNQGILPGMVWQDRDVYLQGPIWAKIPHTDGNFHPSPLMGGFGMKHPPPQILIKNTPVPADPPTAFNKDKLNSFITQYSTGQVSVEIEWELQKENSKRWNPEIQYTSNYYKSNNVEFAVNTEGVYSEPRPIGTRYLTRNL

SEQ ID NO: 297 - DNA, 1800 bp, synthetic construct
  source 1..1800: mol_type = other DNA
acggctcctggaaagaagaggcctgtagagcagtctcctcaggaaccggactcctccgcgggtattggcaaatcgggtgcacagcccgctaaaaagagactcaatttcggtcagactggcgacacagagtcagtcccagaccctcaaccaatcggagaacctcccgcagccccctcaggtgtgggatctcttacaatggcttcaggtggtggcgcaccagtggcagacaataacgaaggtgccgatggagtgggtagttcctcgggaaattggcattgcgattcccaatggctgggggacagagtcatcaccaccagcacccgaacctgggccctgcccacctacaacaatcacctctacaagcaaatctccaacagcacatctggaggatcttcaaatgacaacgcctacttcggctacagcaccccctgggggtattttgacttcaacagattccactgccacttctcaccacgtgactggcagcgactcatcaacaacaactggggattccggcctaagcgactcaacttcaagctcttcaacattcaggtcaaagaggttacggacaacaatggagtcaagaccatcgccaataaccttaccagcacggtccaggtcttcacggactcagactatcagctcccgtacgtgctcgggtcggctcacgagggctgcctcccgccgttcccagcggacgttttcatgattcctcagtacgggtatctgacgcttaatgatggaagccaggccgtgggtcgttcgtccttttacgtgctggaatatttcccgtcgcaaatgctaagaacgggtaacaacttccagttcagctacgagtttgagaacgtacctttccatagcagctacgctcacagccaaagcctggaccgactaatgaatccactcatcgaccaatacttgtactatctctcaaagactattaacggttctggacagaatcaacaaacgctaaaattcagtgtggccggacccagcaacatggctgtccagggaagaaactacatacctggacccagctaccgacaacaacgtgtctcaaccactgtgactcaaaacaacaacagcgaatttgcttggcctggagcttcttcttgggctctcaatggacgtaatagcttgatgaatcctggacctgctatggccagccacaaagaaggagaggaccgtttctttcctttgtctggatctttaatttttggcaaacaaggaactggaagagacaacgtggatgcggacaaagtcatgataaccaacgaagaagaaattaaaactactaacccggtagcaacggagtcctatggacaagtggccacaaaccaccagagtgcccaagcacaggcgcagaccggctgggttcaaaaccaaggaatacttccgggtatggtttggcaggacagagatgtgtacctgcaaggacccatttgggccaaaattcctcacacggacggcaactttcacccttctccgctgatgggagggtttggaatgaagcacccgcctcctcagatcctcatcaaaaacacacctgtacctgcggatcctccaacggccttcaacaaggacaagctgaactctttcatcacccagtattctactggccaagtcagcgtggagatcgagtgggagctgcagaaggaaaacagcaagcgctggaacccggagatccagtacacttccaactattacaagtctaataatgttgaatttgctgttaatactgaaggtgtatatagtgaaccccgccccattggcaccagatacctgactcgtaatctgtaa

SEQ ID NO: 298 - protein, 599 aa, synthetic construct
TAPGKKRPVEQSPQEPDSSAGIGKSGAQPAKKRLNFGQTGDTESVPDPQPIGEPPAAPSGVGSLTMASGGGAPVADNNEGADGVGSSSGNWHCDSQWLGDRVITTSTRTWALPTYNNHLYKQISNSTSGGSSNDNAYFGYSTPWGYFDFNRFHCHFSPRDWQRLINNNWGFRPKRLNFKLFNIQVKEVTDNNGVKTIANNLTSTVQVFTDSDYQLPYVLGSAHEGCLPPFPADVFMIPQYGYLTLNDGSQAVGRSSFYVLEYFPSQMLRTGNNFQFSYEFENVPFHSSYAHSQSLDRLMNPLIDQYLYYLSKTINGSGQNQQTLKFSVAGPSNMAVQGRNYIPGPSYRQQRVSTTVTQNNNSEFAWPGASSWALNGRNSLMNPGPAMASHKEGEDRFFPLSGSLIFGKQGTGRDNVDADKVMITNEEEIKTTNPVATESYGQVATNHQSAQAQAQTGWVQNQGILPGMVWQDRDVYLQGPIWAKIPHTDGNFHPSPLMGGFGMKHPPPQILIKNTPVPADPPTAFNKDKLNSFITQYSTGQVSVEIEWELQKENSKRWNPEIQYTSNYYKSNNVEFAVNTEGVYSEPRPIGTRYLTRNL

SEQ ID NO: 299 - DNA, 1605 bp, synthetic construct
  source 1..1605: mol_type = other DNA
atggcttcaggtggtggcgcaccagtggcagacaataacgaaggtgccgatggagtgggtagttcctcgggaaattggcattgcgattcccaatggctgggggacagagtcatcaccaccagcacccgaacctgggccctgcccacctacaacaatcacctctacaagcaaatctccaacagcacatctggaggatcttcaaatgacaacgcctacttcggctacagcaccccctgggggtattttgacttcaacagattccactgccacttctcaccacgtgactggcagcgactcatcaacaacaactggggattccggcctaagcgactcaacttcaagctcttcaacattcaggtcaaagaggttacggacaacaatggagtcaagaccatcgccaataaccttaccagcacggtccaggtcttcacggactcagactatcagctcccgtacgtgctcgggtcggctcacgagggctgcctcccgccgttcccagcggacgttttcatgattcctcagtacgggtatctgacgcttaatgatggaagccaggccgtgggtcgttcgtccttttacgtgctggaatatttcccgtcgcaaatgctaagaacgggtaacaacttccagttcagctacgagtttgagaacgtacctttccatagcagctacgctcacagccaaagcctggaccgactaatgaatccactcatcgaccaatacttgtactatctctcaaagactattaacggttctggacagaatcaacaaacgctaaaattcagtgtggccggacccagcaacatggctgtccagggaagaaactacatacctggacccagctaccgacaacaacgtgtctcaaccactgtgactcaaaacaacaacagcgaatttgcttggcctggagcttcttcttgggctctcaatggacgtaatagcttgatgaatcctggacctgctatggccagccacaaagaaggagaggaccgtttctttcctttgtctggatctttaatttttggcaaacaaggaactggaagagacaacgtggatgcggacaaagtcatgataaccaacgaagaagaaattaaaactactaacccggtagcaacggagtcctatggacaagtggccacaaaccaccagagtgcccaagcacaggcgcagaccggctgggttcaaaaccaaggaatacttccgggtatggtttggcaggacagagatgtgtacctgcaaggacccatttgggccaaaattcctcacacggacggcaactttcacccttctccgctgatgggagggtttggaatgaagcacccgcctcctcagatcctcatcaaaaacacacctgtacctgcggatcctccaacggccttcaacaaggacaagctgaactctttcatcacccagtattctactggccaagtcagcgtggagatcgagtgggagctgcagaaggaaaacagcaagcgctggaacccggagatccagtacacttccaactattacaagtctaataatgttgaatttgctgttaatactgaaggtgtatatagtgaaccccgccccattggcaccagatacctgactcgtaatctgtaa

SEQ ID NO: 300 - protein, 534 aa, synthetic construct
MASGGGAPVADNNEGADGVGSSSGNWHCDSQWLGDRVITTSTRTWALPTYNNHLYKQISNSTSGGSSNDNAYFGYSTPWGYFDFNRFHCHFSPRDWQRLINNNWGFRPKRLNFKLFNIQVKEVTDNNGVKTIANNLTSTVQVFTDSDYQLPYVLGSAHEGCLPPFPADVFMIPQYGYLTLNDGSQAVGRSSFYVLEYFPSQMLRTGNNFQFSYEFENVPFHSSYAHSQSLDRLMNPLIDQYLYYLSKTINGSGQNQQTLKFSVAGPSNMAVQGRNYIPGPSYRQQRVSTTVTQNNNSEFAWPGASSWALNGRNSLMNPGPAMASHKEGEDRFFPLSGSLIFGKQGTGRDNVDADKVMITNEEEIKTTNPVATESYGQVATNHQSAQAQAQTGWVQNQGILPGMVWQDRDVYLQGPIWAKIPHTDGNFHPSPLMGGFGMKHPPPQILIKNTPVPADPPTAFNKDKLNSFITQYSTGQVSVEIEWELQKENSKRWNPEIQYTSNYYKSNNVEFAVNTEGVYSEPRPIGTRYLTRNL

SEQ ID NO: 301 - DNA, 2211 bp, synthetic construct
  source 1..2211: mol_type = other DNA
atggctgccgatggttatcttccagattggctcgaggacaaccttagtgaaggaattcgcgagtggtgggctttgaaacctggagcccctcaacccaaggcaaatcaacaacatcaagacaacgctcgaggtcttgtgcttccgggttacaaataccttggacccggcaacggactcgacaagggggagccggtcaacgcagcagacgcggcggccctcgagcacgacaaggcctacgaccagcagctcaaggccggagacaacccgtacctcaagtacaaccacgccgacgccgagttccaggagcggctcaaagaagatacgtcttttgggggcaacctcgggcgagcagtcttccaggccaaaaagaggcttcttgaacctcttggtctggttgaggaagcggctaagacggctcctggaaagaagaggcctgtagagcagtctcctcaggaaccggactcctccgcgggtattggcaaatcgggtgcacagcccgctaaaaagagactcaatttcggtcagactggcgacacagagtcagtcccagaccctcaaccaatcggagaacctcccgcagccccctcaggtgtgggatctcttacaatggcttcaggtggtggcgcaccagtggcagacaataacgaaggtgccgatggagtgggtagttcctcgggaaattggcattgcgattcccaatggctgggggacagagtcatcaccaccagcacccgaacctgggccctgcccacctacaacaatcacctctacaagcaaatctccaacagcacatctggaggatcttcaaatgacaacgcctacttcggctacagcaccccctgggggtattttgacttcaacagattccactgccacttctcaccacgtgactggcagcgactcatcaacaacaactggggattccggcctaagcgactcaacttcaagctcttcaacattcaggtcaaagaggttacggacaacaatggagtcaagaccatcgccaataaccttaccagcacggtccaggtcttcacggactcagactatcagctcccgtacgtgctcgggtcggctcacgagggctgcctcccgccgttcccagcggacgttttcatgattcctcagtacgggtatctgacgcttaatgatggaagccaggccgtgggtcgttcgtccttttactgcctggaatatttcccgtcgcaaatgctaagaacgggtaacaacttccagttcagctacgagtttgagaacgtacctttccatagcagctacgctcacagccaaagcctggaccgactaatgaatccactcatcgaccaatacttgtactatctctcaaagactattaacggttctggacagaatcaacaaacgctaaaattcagtgtggccggacccagcaacatggctgtccagggaagaaacttcatacctggacccagctaccgacaacaacgtgtctcaaccactgtgactcaaaacaacaacagcgaatttgcttggcctggagcttcttcttgggctctcaatggacgtaatagcttgatgaatcctggacctgctatggccagccacaaagaaggagaggaccgtttctttcctttgtctggatctttaatttttggcaaacaaggaactggaagagacaacgtggatgcggacaaagtcatgataaccaacgaagaagaaattaaaactactaacccggtagcaacggagtcctatggacaagtggccacaaaccaccagagtgcccaagcacaggcgcagaccggctgggttcaaaaccaaggaatacttccgggtatggtttggcaggacagagatgtgtacctgcaaggacccatttgggccaaaattcctcacacggacggcaactttcacccttctccgctgatgggagggtttggaatgaagcacccgcctcctcagatcctcatcaaaaacacacctgtacctgcggatcctccaacggccttcaacaaggacaagctgaactctttcatcacccagtattctactggccaagtcagcgtggagatcgagtgggagctgcagaaggaaaacagcaagcgctggaacccggagatccagtacacttccaactattacaagtctaataatgttgaatttgctgttaatactgaaggtgtatatagtgaaccccgccccattggcaccagatacctgactcgtaatctgtaa

SEQ ID NO: 302 - protein, 736 aa, synthetic construct
MAADGYLPDWLEDNLSEGIREWWALKPGAPQPKANQQHQDNARGLVLPGYKYLGPGNGLDKGEPVNAADAAALEHDKAYDQQLKAGDNPYLKYNHADAEFQERLKEDTSFGGNLGRAVFQAKKRLLEPLGLVEEAAKTAPGKKRPVEQSPQEPDSSAGIGKSGAQPAKKRLNFGQTGDTESVPDPQPIGEPPAAPSGVGSLTMASGGGAPVADNNEGADGVGSSSGNWHCDSQWLGDRVITTSTRTWALPTYNNHLYKQISNSTSGGSSNDNAYFGYSTPWGYFDFNRFHCHFSPRDWQRLINNNWGFRPKRLNFKLFNIQVKEVTDNNGVKTIANNLTSTVQVFTDSDYQLPYVLGSAHEGCLPPFPADVFMIPQYGYLTLNDGSQAVGRSSFYCLEYFPSQMLRTGNNFQFSYEFENVPFHSSYAHSQSLDRLMNPLIDQYLYYLSKTINGSGQNQQTLKFSVAGPSNMAVQGRNFIPGPSYRQQRVSTTVTQNNNSEFAWPGASSWALNGRNSLMNPGPAMASHKEGEDRFFPLSGSLIFGKQGTGRDNVDADKVMITNEEEIKTTNPVATESYGQVATNHQSAQAQAQTGWVQNQGILPGMVWQDRDVYLQGPIWAKIPHTDGNFHPSPLMGGFGMKHPPPQILIKNTPVPADPPTAFNKDKLNSFITQYSTGQVSVEIEWELQKENSKRWNPEIQYTSNYYKSNNVEFAVNTEGVYSEPRPIGTRYLTRNL

SEQ ID NO: 303 - DNA, 1800 bp, synthetic construct
  source 1..1800: mol_type = other DNA
acggctcctggaaagaagaggcctgtagagcagtctcctcaggaaccggactcctccgcgggtattggcaaatcgggtgcacagcccgctaaaaagagactcaatttcggtcagactggcgacacagagtcagtcccagaccctcaaccaatcggagaacctcccgcagccccctcaggtgtgggatctcttacaatggcttcaggtggtggcgcaccagtggcagacaataacgaaggtgccgatggagtgggtagttcctcgggaaattggcattgcgattcccaatggctgggggacagagtcatcaccaccagcacccgaacctgggccctgcccacctacaacaatcacctctacaagcaaatctccaacagcacatctggaggatcttcaaatgacaacgcctacttcggctacagcaccccctgggggtattttgacttcaacagattccactgccacttctcaccacgtgactggcagcgactcatcaacaacaactggggattccggcctaagcgactcaacttcaagctcttcaacattcaggtcaaagaggttacggacaacaatggagtcaagaccatcgccaataaccttaccagcacggtccaggtcttcacggactcagactatcagctcccgtacgtgctcgggtcggctcacgagggctgcctcccgccgttcccagcggacgttttcatgattcctcagtacgggtatctgacgcttaatgatggaagccaggccgtgggtcgttcgtccttttactgcctggaatatttcccgtcgcaaatgctaagaacgggtaacaacttccagttcagctacgagtttgagaacgtacctttccatagcagctacgctcacagccaaagcctggaccgactaatgaatccactcatcgaccaatacttgtactatctctcaaagactattaacggttctggacagaatcaacaaacgctaaaattcagtgtggccggacccagcaacatggctgtccagggaagaaacttcatacctggacccagctaccgacaacaacgtgtctcaaccactgtgactcaaaacaacaacagcgaatttgcttggcctggagcttcttcttgggctctcaatggacgtaatagcttgatgaatcctggacctgctatggccagccacaaagaaggagaggaccgtttctttcctttgtctggatctttaatttttggcaaacaaggaactggaagagacaacgtggatgcggacaaagtcatgataaccaacgaagaagaaattaaaactactaacccggtagcaacggagtcctatggacaagtggccacaaaccaccagagtgcccaagcacaggcgcagaccggctgggttcaaaaccaaggaatacttccgggtatggtttggcaggacagagatgtgtacctgcaaggacccatttgggccaaaattcctcacacggacggcaactttcacccttctccgctgatgggagggtttggaatgaagcacccgcctcctcagatcctcatcaaaaacacacctgtacctgcggatcctccaacggccttcaacaaggacaagctgaactctttcatcacccagtattctactggccaagtcagcgtggagatcgagtgggagctgcagaaggaaaacagcaagcgctggaacccggagatccagtacacttccaactattacaagtctaataatgttgaatttgctgttaatactgaaggtgtatatagtgaaccccgccccattggcaccagatacctgactcgtaatctgtaa

SEQ ID NO: 304 - protein, 599 aa, synthetic construct
TAPGKKRPVEQSPQEPDSSAGIGKSGAQPAKKRLNFGQTGDTESVPDPQPIGEPPAAPSGVGSLTMASGGGAPVADNNEGADGVGSSSGNWHCDSQWLGDRVITTSTRTWALPTYNNHLYKQISNSTSGGSSNDNAYFGYSTPWGYFDFNRFHCHFSPRDWQRLINNNWGFRPKRLNFKLFNIQVKEVTDNNGVKTIANNLTSTVQVFTDSDYQLPYVLGSAHEGCLPPFPADVFMIPQYGYLTLNDGSQAVGRSSFYCLEYFPSQMLRTGNNFQFSYEFENVPFHSSYAHSQSLDRLMNPLIDQYLYYLSKTINGSGQNQQTLKFSVAGPSNMAVQGRNFIPGPSYRQQRVSTTVTQNNNSEFAWPGASSWALNGRNSLMNPGPAMASHKEGEDRFFPLSGSLIFGKQGTGRDNVDADKVMITNEEEIKTTNPVATESYGQVATNHQSAQAQAQTGWVQNQGILPGMVWQDRDVYLQGPIWAKIPHTDGNFHPSPLMGGFGMKHPPPQILIKNTPVPADPPTAFNKDKLNSFITQYSTGQVSVEIEWELQKENSKRWNPEIQYTSNYYKSNNVEFAVNTEGVYSEPRPIGTRYLTRNL

SEQ ID NO: 305 - DNA, 1605 bp, synthetic construct
  source 1..1605: mol_type = other DNA
atggcttcaggtggtggcgcaccagtggcagacaataacgaaggtgccgatggagtgggtagttcctcgggaaattggcattgcgattcccaatggctgggggacagagtcatcaccaccagcacccgaacctgggccctgcccacctacaacaatcacctctacaagcaaatctccaacagcacatctggaggatcttcaaatgacaacgcctacttcggctacagcaccccctgggggtattttgacttcaacagattccactgccacttctcaccacgtgactggcagcgactcatcaacaacaactggggattccggcctaagcgactcaacttcaagctcttcaacattcaggtcaaagaggttacggacaacaatggagtcaagaccatcgccaataaccttaccagcacggtccaggtcttcacggactcagactatcagctcccgtacgtgctcgggtcggctcacgagggctgcctcccgccgttcccagcggacgttttcatgattcctcagtacgggtatctgacgcttaatgatggaagccaggccgtgggtcgttcgtccttttactgcctggaatatttcccgtcgcaaatgctaagaacgggtaacaacttccagttcagctacgagtttgagaacgtacctttccatagcagctacgctcacagccaaagcctggaccgactaatgaatccactcatcgaccaatacttgtactatctctcaaagactattaacggttctggacagaatcaacaaacgctaaaattcagtgtggccggacccagcaacatggctgtccagggaagaaacttcatacctggacccagctaccgacaacaacgtgtctcaaccactgtgactcaaaacaacaacagcgaatttgcttggcctggagcttcttcttgggctctcaatggacgtaatagcttgatgaatcctggacctgctatggccagccacaaagaaggagaggaccgtttctttcctttgtctggatctttaatttttggcaaacaaggaactggaagagacaacgtggatgcggacaaagtcatgataaccaacgaagaagaaattaaaactactaacccggtagcaacggagtcctatggacaagtggccacaaaccaccagagtgcccaagcacaggcgcagaccggctgggttcaaaaccaaggaatacttccgggtatggtttggcaggacagagatgtgtacctgcaaggacccatttgggccaaaattcctcacacggacggcaactttcacccttctccgctgatgggagggtttggaatgaagcacccgcctcctcagatcctcatcaaaaacacacctgtacctgcggatcctccaacggccttcaacaaggacaagctgaactctttcatcacccagtattctactggccaagtcagcgtggagatcgagtgggagctgcagaaggaaaacagcaagcgctggaacccggagatccagtacacttccaactattacaagtctaataatgttgaatttgctgttaatactgaaggtgtatatagtgaaccccgccccattggcaccagatacctgactcgtaatctgtaa

SEQ ID NO: 306 - protein, 534 aa, synthetic construct
MASGGGAPVADNNEGADGVGSSSGNWHCDSQWLGDRVITTSTRTWALPTYNNHLYKQISNSTSGGSSNDNAYFGYSTPWGYFDFNRFHCHFSPRDWQRLINNNWGFRPKRLNFKLFNIQVKEVTDNNGVKTIANNLTSTVQVFTDSDYQLPYVLGSAHEGCLPPFPADVFMIPQYGYLTLNDGSQAVGRSSFYCLEYFPSQMLRTGNNFQFSYEFENVPFHSSYAHSQSLDRLMNPLIDQYLYYLSKTINGSGQNQQTLKFSVAGPSNMAVQGRNFIPGPSYRQQRVSTTVTQNNNSEFAWPGASSWALNGRNSLMNPGPAMASHKEGEDRFFPLSGSLIFGKQGTGRDNVDADKVMITNEEEIKTTNPVATESYGQVATNHQSAQAQAQTGWVQNQGILPGMVWQDRDVYLQGPIWAKIPHTDGNFHPSPLMGGFGMKHPPPQILIKNTPVPADPPTAFNKDKLNSFITQYSTGQVSVEIEWELQKENSKRWNPEIQYTSNYYKSNNVEFAVNTEGVYSEPRPIGTRYLTRNL

SEQ ID NO: 307 - DNA, 2211 bp, synthetic construct
  source 1..2211: mol_type = other DNA
atggctgccgatggttatcttccagattggctcgaggacaaccttagtgaaggaattcgcgagtggtgggctttgaaacctggagcccctcaacccaaggcaaatcaacaacatcaagacaacgctcgaggtcttgtgcttccgggttacaaataccttggacccggcaacggactcgacaagggggagccggtcaacgcagcagacgcggcggccctcgagcacgacaaggcctacgaccagcagctcaaggccggagacaacccgtacctcaagtacaaccacgccgacgccgagttccaggagcggctcaaagaagatacgtcttttgggggcaacctcgggcgagcagtcttccaggccaaaaagaggcttcttgaacctcttggtctggttgaggaagcggctaagacggctcctggaaagaagaggcctgtagagcagtctcctcaggaaccggactcctccgcgggtattggcaaatcgggtgcacagcccgctaaaaagagactcaatttcggtcagactggcgacacagagtcagtcccagaccctcaaccaatcggagaacctcccgcagccccctcaggtgtgggatctcttacaatggcttcaggtggtggcgcaccagtggcagacaataacgaaggtgccgatggagtgggtagttcctcgggaaattggcattgcgattcccaatggctgggggacagagtcatcaccaccagcacccgaacctgggccctgcccacctacaacaatcacctctacaagcaaatctccaacagcacatctggaggatcttcaaatgacaacgcctacttcggctacagcaccccctgggggtattttgacttcaacagattccactgccacttctcaccacttgactggcagcgactcatcaacaacaactggggattccggcctaagcgactcaacttcaagctcttcaacattcaggtcaaagaggttacggacaacaatggagtcaagaccatcgccaataaccttaccagcacggtccaggtcttcacggactcagactatcagctcccgtacgtgctcgggtcggctcacgagggctgcctcccgccgttcccagcggacgttttcatgattcctcagtacgggtatctgacgcttaatgatggaagccaggccgtgggtcgttcgtccttttactgcctggaatatttcccgtcgcaaatgctaagaacgggtaacaacttccagttcagctacgagtttgagaacgtacctttccatagcagctacgctcacagccaaagcctggaccgactaatgaatccactcatcgaccaatacttgtactatctctcaaagactattaacggttctggacagaatcaacaaacgctaaaattcagtgtggccggacccagcaacatggctgtccagggaagaaactacatacctggacccagctaccgacaacaacgtgtctcaaccactgtgactcaaaacaacaacagcgaatttgcttggcctggagcttcttcttgggctctcaatggacgtaatagcttgatgaatcctggacctgctatggccagccacaaagaaggagaggaccgtttctttcctttgtctggatctttaatttttggcaaacaaggaactggaagagacaacgtggatgcggacaaagtcatgataaccaacgaagaagaaattaaaactactaacccggtagcaacggagtcctatggacaagtggccacaaaccaccagagtgcccaagcacaggcgcagaccggctgggttcaaaaccaaggaatacttccgggtatggtttggcaggacagagatgtgtacctgcaaggacccatttgggccaaaattcctcacacggacggcaactttcacccttctccgctgatgggagggtttggaatgaagcacccgcctcctcagatcctcatcaaaaacacacctgtacctgcggatcctccaacggccttcaacaaggacaagctgaactctttcatcacccagtattctactggccaagtcagcgtggagatcgagtgggagctgcagaaggaaaacagcaagcgctggaacccggagatccagtacacttccaactattacaagtctaataatgttgaatttgctgttaatactgaaggtgtatatagtgaaccccgccccattggcaccagatacctgactcgtaatctgtaa

SEQ ID NO: 308 - protein, 736 aa, synthetic construct
MAADGYLPDWLEDNLSEGIREWWALKPGAPQPKANQQHQDNARGLVLPGYKYLGPGNGLDKGEPVNAADAAALEHDKAYDQQLKAGDNPYLKYNHADAEFQERLKEDTSFGGNLGRAVFQAKKRLLEPLGLVEEAAKTAPGKKRPVEQSPQEPDSSAGIGKSGAQPAKKRLNFGQTGDTESVPDPQPIGEPPAAPSGVGSLTMASGGGAPVADNNEGADGVGSSSGNWHCDSQWLGDRVITTSTRTWALPTYNNHLYKQISNSTSGGSSNDNAYFGYSTPWGYFDFNRFHCHFSPLDWQRLINNNWGFRPKRLNFKLFNIQVKEVTDNNGVKTIANNLTSTVQVFTDSDYQLPYVLGSAHEGCLPPFPADVFMIPQYGYLTLNDGSQAVGRSSFYCLEYFPSQMLRTGNNFQFSYEFENVPFHSSYAHSQSLDRLMNPLIDQYLYYLSKTINGSGQNQQTLKFSVAGPSNMAVQGRNYIPGPSYRQQRVSTTVTQNNNSEFAWPGASSWALNGRNSLMNPGPAMASHKEGEDRFFPLSGSLIFGKQGTGRDNVDADKVMITNEEEIKTTNPVATESYGQVATNHQSAQAQAQTGWVQNQGILPGMVWQDRDVYLQGPIWAKIPHTDGNFHPSPLMGGFGMKHPPPQILIKNTPVPADPPTAFNKDKLNSFITQYSTGQVSVEIEWELQKENSKRWNPEIQYTSNYYKSNNVEFAVNTEGVYSEPRPIGTRYLTRNL

SEQ ID NO: 309 - DNA, 1800 bp, synthetic construct
  source 1..1800: mol_type = other DNA
acggctcctggaaagaagaggcctgtagagcagtctcctcaggaaccggactcctccgcgggtattggcaaatcgggtgcacagcccgctaaaaagagactcaatttcggtcagactggcgacacagagtcagtcccagaccctcaaccaatcggagaacctcccgcagccccctcaggtgtgggatctcttacaatggcttcaggtggtggcgcaccagtggcagacaataacgaaggtgccgatggagtgggtagttcctcgggaaattggcattgcgattcccaatggctgggggacagagtcatcaccaccagcacccgaacctgggccctgcccacctacaacaatcacctctacaagcaaatctccaacagcacatctggaggatcttcaaatgacaacgcctacttcggctacagcaccccctgggggtattttgacttcaacagattccactgccacttctcaccacttgactggcagcgactcatcaacaacaactggggattccggcctaagcgactcaacttcaagctcttcaacattcaggtcaaagaggttacggacaacaatggagtcaagaccatcgccaataaccttaccagcacggtccaggtcttcacggactcagactatcagctcccgtacgtgctcgggtcggctcacgagggctgcctcccgccgttcccagcggacgttttcatgattcctcagtacgggtatctgacgcttaatgatggaagccaggccgtgggtcgttcgtccttttactgcctggaatatttcccgtcgcaaatgctaagaacgggtaacaacttccagttcagctacgagtttgagaacgtacctttccatagcagctacgctcacagccaaagcctggaccgactaatgaatccactcatcgaccaatacttgtactatctctcaaagactattaacggttctggacagaatcaacaaacgctaaaattcagtgtggccggacccagcaacatggctgtccagggaagaaactacatacctggacccagctaccgacaacaacgtgtctcaaccactgtgactcaaaacaacaacagcgaatttgcttggcctggagcttcttcttgggctctcaatggacgtaatagcttgatgaatcctggacctgctatggccagccacaaagaaggagaggaccgtttctttcctttgtctggatctttaatttttggcaaacaaggaactggaagagacaacgtggatgcggacaaagtcatgataaccaacgaagaagaaattaaaactactaacccggtagcaacggagtcctatggacaagtggccacaaaccaccagagtgcccaagcacaggcgcagaccggctgggttcaaaaccaaggaatacttccgggtatggtttggcaggacagagatgtgtacctgcaaggacccatttgggccaaaattcctcacacggacggcaactttcacccttctccgctgatgggagggtttggaatgaagcacccgcctcctcagatcctcatcaaaaacacacctgtacctgcggatcctccaacggccttcaacaaggacaagctgaactctttcatcacccagtattctactggccaagtcagcgtggagatcgagtgggagctgcagaaggaaaacagcaagcgctggaacccggagatccagtacacttccaactattacaagtctaataatgttgaatttgctgttaatactgaaggtgtatatagtgaaccccgccccattggcaccagatacctgactcgtaatctgtaa

SEQ ID NO: 310 - protein, 599 aa, synthetic construct
TAPGKKRPVEQSPQEPDSSAGIGKSGAQPAKKRLNFGQTGDTESVPDPQPIGEPPAAPSGVGSLTMASGGGAPVADNNEGADGVGSSSGNWHCDSQWLGDRVITTSTRTWALPTYNNHLYKQISNSTSGGSSNDNAYFGYSTPWGYFDFNRFHCHFSPLDWQRLINNNWGFRPKRLNFKLFNIQVKEVTDNNGVKTIANNLTSTVQVFTDSDYQLPYVLGSAHEGCLPPFPADVFMIPQYGYLTLNDGSQAVGRSSFYCLEYFPSQMLRTGNNFQFSYEFENVPFHSSYAHSQSLDRLMNPLIDQYLYYLSKTINGSGQNQQTLKFSVAGPSNMAVQGRNYIPGPSYRQQRVSTTVTQNNNSEFAWPGASSWALNGRNSLMNPGPAMASHKEGEDRFFPLSGSLIFGKQGTGRDNVDADKVMITNEEEIKTTNPVATESYGQVATNHQSAQAQAQTGWVQNQGILPGMVWQDRDVYLQGPIWAKIPHTDGNFHPSPLMGGFGMKHPPPQILIKNTPVPADPPTAFNKDKLNSFITQYSTGQVSVEIEWELQKENSKRWNPEIQYTSNYYKSNNVEFAVNTEGVYSEPRPIGTRYLTRNL

SEQ ID NO: 311 - DNA, 1605 bp, synthetic construct
  source 1..1605: mol_type = other DNA
atggcttcaggtggtggcgcaccagtggcagacaataacgaaggtgccgatggagtgggtagttcctcgggaaattggcattgcgattcccaatggctgggggacagagtcatcaccaccagcacccgaacctgggccctgcccacctacaacaatcacctctacaagcaaatctccaacagcacatctggaggatcttcaaatgacaacgcctacttcggctacagcaccccctgggggtattttgacttcaacagattccactgccacttctcaccacttgactggcagcgactcatcaacaacaactggggattccggcctaagcgactcaacttcaagctcttcaacattcaggtcaaagaggttacggacaacaatggagtcaagaccatcgccaataaccttaccagcacggtccaggtcttcacggactcagactatcagctcccgtacgtgctcgggtcggctcacgagggctgcctcccgccgttcccagcggacgttttcatgattcctcagtacgggtatctgacgcttaatgatggaagccaggccgtgggtcgttcgtccttttactgcctggaatatttcccgtcgcaaatgctaagaacgggtaacaacttccagttcagctacgagtttgagaacgtacctttccatagcagctacgctcacagccaaagcctggaccgactaatgaatccactcatcgaccaatacttgtactatctctcaaagactattaacggttctggacagaatcaacaaacgctaaaattcagtgtggccggacccagcaacatggctgtccagggaagaaactacatacctggacccagctaccgacaacaacgtgtctcaaccactgtgactcaaaacaacaacagcgaatttgcttggcctggagcttcttcttgggctctcaatggacgtaatagcttgatgaatcctggacctgctatggccagccacaaagaaggagaggaccgtttctttcctttgtctggatctttaatttttggcaaacaaggaactggaagagacaacgtggatgcggacaaagtcatgataaccaacgaagaagaaattaaaactactaacccggtagcaacggagtcctatggacaagtggccacaaaccaccagagtgcccaagcacaggcgcagaccggctgggttcaaaaccaaggaatacttccgggtatggtttggcaggacagagatgtgtacctgcaaggacccatttgggccaaaattcctcacacggacggcaactttcacccttctccgctgatgggagggtttggaatgaagcacccgcctcctcagatcctcatcaaaaacacacctgtacctgcggatcctccaacggccttcaacaaggacaagctgaactctttcatcacccagtattctactggccaagtcagcgtggagatcgagtgggagctgcagaaggaaaacagcaagcgctggaacccggagatccagtacacttccaactattacaagtctaataatgttgaatttgctgttaatactgaaggtgtatatagtgaaccccgccccattggcaccagatacctgactcgtaatctgtaa

SEQ ID NO: 312 - protein, 534 aa, synthetic construct
MASGGGAPVADNNEGADGVGSSSGNWHCDSQWLGDRVITTSTRTWALPTYNNHLYKQISNSTSGGSSNDNAYFGYSTPWGYFDFNRFHCHFSPLDWQRLINNNWGFRPKRLNFKLFNIQVKEVTDNNGVKTIANNLTSTVQVFTDSDYQLPYVLGSAHEGCLPPFPADVFMIPQYGYLTLNDGSQAVGRSSFYCLEYFPSQMLRTGNNFQFSYEFENVPFHSSYAHSQSLDRLMNPLIDQYLYYLSKTINGSGQNQQTLKFSVAGPSNMAVQGRNYIPGPSYRQQRVSTTVTQNNNSEFAWPGASSWALNGRNSLMNPGPAMASHKEGEDRFFPLSGSLIFGKQGTGRDNVDADKVMITNEEEIKTTNPVATESYGQVATNHQSAQAQAQTGWVQNQGILPGMVWQDRDVYLQGPIWAKIPHTDGNFHPSPLMGGFGMKHPPPQILIKNTPVPADPPTAFNKDKLNSFITQYSTGQVSVEIEWELQKENSKRWNPEIQYTSNYYKSNNVEFAVNTEGVYSEPRPIGTRYLTRNL

SEQ ID NO: 313 - DNA, 2211 bp, synthetic construct
  source 1..2211: mol_type = other DNA
atggctgccgatggttatcttccagattggctcgaggacaaccttagtgaaggaattcgcgagtggtgggctttgaaacctggagcccctcaacccaaggcaaatcaacaacatcaagacaacgctcgaggtcttgtgcttccgggttacaaataccttggacccggcaacggactcgacaagggggagccggtcaacgcagcagacgcggcggccctcgagcacgacaaggcctacgaccagcagctcaaggccggagacaacccgtacctcaagtacaaccacgccgacgccgagttccaggagcggctcaaagaagatacgtcttttgggggcaacctcgggcgagcagtcttccaggccaaaaagaggcttcttgaacctcttggtctggttgaggaagcggctaagacggctcctggaaagaagaggcctgtagagcagtctcctcaggaaccggactcctccgcgggtattggcaaatcgggtgcacagcccgctaaaaagagactcaatttcggtcagactggcgacacagagtcagtcccagaccctcaaccaatcggagaacctcccgcagccccctcaggtgtgggatctcttacaatggcttcaggtggtggcgcaccagtggcagacaataacgaaggtgccgatggagtgggtagttcctcgggaaattggcattgcgattcccaatggctgggggacagagtcatcaccaccagcacccgaacctgggccctgcccacctacaacaatcacctctacaagcaaatctccaacagcacatctggaggatcttcaaatgacaacgcctacttcggctacagcaccccctgggggtattttgacttcaacagattccactgccacttctcaccacgtgactggcagcgactcatcaacaacaactggggattccggcctaagcgactcaacttcaagctcttcaacattcaggtcaaagaggttacggacaacaatggagtcaagaccatcgccaataaccttaccagcacggtccaggtcttcacggactcagactatcagctcccgtacgtgctcgggtcggctcacgagggctgcctcccgccgttcccagcggacgttttcatgattcctcagtacgggtatctgacgcttaatgatggaagccaggccgtgggtcgttcgtccttttactgcctggaatatttcccgtcgcaaatgctaagaacgggtaacaacttccagttcagctacgagtttgagaacgtacctttccatagcagctacgctcacagccaaagcctggaccgactaatgaatccactcatcgaccaatacttgtactatctctcaaagactattaacggttctggacagaatcaacaaacgctaaaattcagtgtggccggacccagcaacatggctgtccagggaagaaactacatacctggacccagctaccgacaacaacgtgtctcaaccactgtgactcaaaacaacaacagcgaatttgcttggcctggagcttcttcttgggctctcaatggacgtaatagcttgatgaatcctggacctgctatggccagccacaaagaaggagaggaccgtttctttcctttgtctggatctttaatttttggcaaacaaggaactggaagagacaacgtggatgcggacaaagtcatgataaccaacgaagaagaaattaaaactactaacccggtagcaacggagtcctatggacaagtggccacaaaccaccagagtgcccaagcacaggcgcagaccggctgggttcaaaaccaaggaatacttccgggtatggtttggcaggacagagatgtgtacctgcaaggacccatttgggccaaaattcctcacacggacggcaactttcacccttctccgctgatgggagggtttggaatgaagcacccgcctcctcagatcctcatcaaaaacacacctgtacctgcggatcctccaacggccttcaacaaggacaagctgaactctttcatcacccagtattctactggccaagtcagcgtggagatcgagtgggagctgcagaaggaaaacagcaagcgctggaacccggagatccagtacacttccaactattacaagtctaataatgttgaatttgctgttaatactgaaggtgtatatagtgaaccccgccccattggcaccagatacctggtccgtaatctgtaa

SEQ ID NO: 314 - protein, 736 aa, synthetic construct
MAADGYLPDWLEDNLSEGIREWWALKPGAPQPKANQQHQDNARGLVLPGYKYLGPGNGLDKGEPVNAADAAALEHDKAYDQQLKAGDNPYLKYNHADAEFQERLKEDTSFGGNLGRAVFQAKKRLLEPLGLVEEAAKTAPGKKRPVEQSPQEPDSSAGIGKSGAQPAKKRLNFGQTGDTESVPDPQPIGEPPAAPSGVGSLTMASGGGAPVADNNEGADGVGSSSGNWHCDSQWLGDRVITTSTRTWALPTYNNHLYKQISNSTSGGSSNDNAYFGYSTPWGYFDFNRFHCHFSPRDWQRLINNNWGFRPKRLNFKLFNIQVKEVTDNNGVKTIANNLTSTVQVFTDSDYQLPYVLGSAHEGCLPPFPADVFMIPQYGYLTLNDGSQAVGRSSFYCLEYFPSQMLRTGNNFQFSYEFENVPFHSSYAHSQSLDRLMNPLIDQYLYYLSKTINGSGQNQQTLKFSVAGPSNMAVQGRNYIPGPSYRQQRVSTTVTQNNNSEFAWPGASSWALNGRNSLMNPGPAMASHKEGEDRFFPLSGSLIFGKQGTGRDNVDADKVMITNEEEIKTTNPVATESYGQVATNHQSAQAQAQTGWVQNQGILPGMVWQDRDVYLQGPIWAKIPHTDGNFHPSPLMGGFGMKHPPPQILIKNTPVPADPPTAFNKDKLNSFITQYSTGQVSVEIEWELQKENSKRWNPEIQYTSNYYKSNNVEFAVNTEGVYSEPRPIGTRYLVRNL

SEQ ID NO: 315 - DNA, 1800 bp, synthetic construct
  source 1..1800: mol_type = other DNA
acggctcctggaaagaagaggcctgtagagcagtctcctcaggaaccggactcctccgcgggtattggcaaatcgggtgcacagcccgctaaaaagagactcaatttcggtcagactggcgacacagagtcagtcccagaccctcaaccaatcggagaacctcccgcagccccctcaggtgtgggatctcttacaatggcttcaggtggtggcgcaccagtggcagacaataacgaaggtgccgatggagtgggtagttcctcgggaaattggcattgcgattcccaatggctgggggacagagtcatcaccaccagcacccgaacctgggccctgcccacctacaacaatcacctctacaagcaaatctccaacagcacatctggaggatcttcaaatgacaacgcctacttcggctacagcaccccctgggggtattttgacttcaacagattccactgccacttctcaccacgtgactggcagcgactcatcaacaacaactggggattccggcctaagcgactcaacttcaagctcttcaacattcaggtcaaagaggttacggacaacaatggagtcaagaccatcgccaataaccttaccagcacggtccaggtcttcacggactcagactatcagctcccgtacgtgctcgggtcggctcacgagggctgcctcccgccgttcccagcggacgttttcatgattcctcagtacgggtatctgacgcttaatgatggaagccaggccgtgggtcgttcgtccttttactgcctggaatatttcccgtcgcaaatgctaagaacgggtaacaacttccagttcagctacgagtttgagaacgtacctttccatagcagctacgctcacagccaaagcctggaccgactaatgaatccactcatcgaccaatacttgtactatctctcaaagactattaacggttctggacagaatcaacaaacgctaaaattcagtgtggccggacccagcaacatggctgtccagggaagaaactacatacctggacccagctaccgacaacaacgtgtctcaaccactgtgactcaaaacaacaacagcgaatttgcttggcctggagcttcttcttgggctctcaatggacgtaatagcttgatgaatcctggacctgctatggccagccacaaagaaggagaggaccgtttctttcctttgtctggatctttaatttttggcaaacaaggaactggaagagacaacgtggatgcggacaaagtcatgataaccaacgaagaagaaattaaaactactaacccggtagcaacggagtcctatggacaagtggccacaaaccaccagagtgcccaagcacaggcgcagaccggctgggttcaaaaccaaggaatacttccgggtatggtttggcaggacagagatgtgtacctgcaaggacccatttgggccaaaattcctcacacggacggcaactttcacccttctccgctgatgggagggtttggaatgaagcacccgcctcctcagatcctcatcaaaaacacacctgtacctgcggatcctccaacggccttcaacaaggacaagctgaactctttcatcacccagtattctactggccaagtcagcgtggagatcgagtgggagctgcagaaggaaaacagcaagcgctggaacccggagatccagtacacttccaactattacaagtctaataatgttgaatttgctgttaatactgaaggtgtatatagtgaaccccgccccattggcaccagatacctggtccgtaatctgtaa

SEQ ID NO: 316 - protein, 599 aa, synthetic construct
TAPGKKRPVEQSPQEPDSSAGIGKSGAQPAKKRLNFGQTGDTESVPDPQPIGEPPAAPSGVGSLTMASGGGAPVADNNEGADGVGSSSGNWHCDSQWLGDRVITTSTRTWALPTYNNHLYKQISNSTSGGSSNDNAYFGYSTPWGYFDFNRFHCHFSPRDWQRLINNNWGFRPKRLNFKLFNIQVKEVTDNNGVKTIANNLTSTVQVFTDSDYQLPYVLGSAHEGCLPPFPADVFMIPQYGYLTLNDGSQAVGRSSFYCLEYFPSQMLRTGNNFQFSYEFENVPFHSSYAHSQSLDRLMNPLIDQYLYYLSKTINGSGQNQQTLKFSVAGPSNMAVQGRNYIPGPSYRQQRVSTTVTQNNNSEFAWPGASSWALNGRNSLMNPGPAMASHKEGEDRFFPLSGSLIFGKQGTGRDNVDADKVMITNEEEIKTTNPVATESYGQVATNHQSAQAQAQTGWVQNQGILPGMVWQDRDVYLQGPIWAKIPHTDGNFHPSPLMGGFGMKHPPPQILIKNTPVPADPPTAFNKDKLNSFITQYSTGQVSVEIEWELQKENSKRWNPEIQYTSNYYKSNNVEFAVNTEGVYSEPRPIGTRYLVRNL

SEQ ID NO: 317 - DNA, 1605 bp, synthetic construct
  source 1..1605: mol_type = other DNA
atggcttcaggtggtggcgcaccagtggcagacaataacgaaggtgccgatggagtgggtagttcctcgggaaattggcattgcgattcccaatggctgggggacagagtcatcaccaccagcacccgaacctgggccctgcccacctacaacaatcacctctacaagcaaatctccaacagcacatctggaggatcttcaaatgacaacgcctacttcggctacagcaccccctgggggtattttgacttcaacagattccactgccacttctcaccacgtgactggcagcgactcatcaacaacaactggggattccggcctaagcgactcaacttcaagctcttcaacattcaggtcaaagaggttacggacaacaatggagtcaagaccatcgccaataaccttaccagcacggtccaggtcttcacggactcagactatcagctcccgtacgtgctcgggtcggctcacgagggctgcctcccgccgttcccagcggacgttttcatgattcctcagtacgggtatctgacgcttaatgatggaagccaggccgtgggtcgttcgtccttttactgcctggaatatttcccgtcgcaaatgctaagaacgggtaacaacttccagttcagctacgagtttgagaacgtacctttccatagcagctacgctcacagccaaagcctggaccgactaatgaatccactcatcgaccaatacttgtactatctctcaaagactattaacggttctggacagaatcaacaaacgctaaaattcagtgtggccggacccagcaacatggctgtccagggaagaaactacatacctggacccagctaccgacaacaacgtgtctcaaccactgtgactcaaaacaacaacagcgaatttgcttggcctggagcttcttcttgggctctcaatggacgtaatagcttgatgaatcctggacctgctatggccagccacaaagaaggagaggaccgtttctttcctttgtctggatctttaatttttggcaaacaaggaactggaagagacaacgtggatgcggacaaagtcatgataaccaacgaagaagaaattaaaactactaacccggtagcaacggagtcctatggacaagtggccacaaaccaccagagtgcccaagcacaggcgcagaccggctgggttcaaaaccaaggaatacttccgggtatggtttggcaggacagagatgtgtacctgcaaggacccatttgggccaaaattcctcacacggacggcaactttcacccttctccgctgatgggagggtttggaatgaagcacccgcctcctcagatcctcatcaaaaacacacctgtacctgcggatcctccaacggccttcaacaaggacaagctgaactctttcatcacccagtattctactggccaagtcagcgtggagatcgagtgggagctgcagaaggaaaacagcaagcgctggaacccggagatccagtacacttccaactattacaagtctaataatgttgaatttgctgttaatactgaaggtgtatatagtgaaccccgccccattggcaccagatacctggtccgtaatctgtaa

SEQ ID NO: 318 - protein, 534 aa, synthetic construct
MASGGGAPVADNNEGADGVGSSSGNWHCDSQWLGDRVITTSTRTWALPTYNNHLYKQISNSTSGGSSNDNAYFGYSTPWGYFDFNRFHCHFSPRDWQRLINNNWGFRPKRLNFKLFNIQVKEVTDNNGVKTIANNLTSTVQVFTDSDYQLPYVLGSAHEGCLPPFPADVFMIPQYGYLTLNDGSQAVGRSSFYCLEYFPSQMLRTGNNFQFSYEFENVPFHSSYAHSQSLDRLMNPLIDQYLYYLSKTINGSGQNQQTLKFSVAGPSNMAVQGRNYIPGPSYRQQRVSTTVTQNNNSEFAWPGASSWALNGRNSLMNPGPAMASHKEGEDRFFPLSGSLIFGKQGTGRDNVDADKVMITNEEEIKTTNPVATESYGQVATNHQSAQAQAQTGWVQNQGILPGMVWQDRDVYLQGPIWAKIPHTDGNFHPSPLMGGFGMKHPPPQILIKNTPVPADPPTAFNKDKLNSFITQYSTGQVSVEIEWELQKENSKRWNPEIQYTSNYYKSNNVEFAVNTEGVYSEPRPIGTRYLVRNL

SEQ ID NO: 319 - DNA, 2211 bp, synthetic construct
  source 1..2211: mol_type = other DNA
atggctgccgatggttatcttccagattggctcgaggacaaccttagtgaaggaattcgcgagtggtgggctttgaaacctggagcccctcaacccaaggcaaatcaacaacatcaagacaacgctcgaggtcttgtgcttccgggttacaaataccttggacccggcaacggactcgacaagggggagccggtcaacgcagcagacgcggcggccctcgagcacgacaaggcctacgaccagcagctcaaggccggagacaacccgtacctcaagtacaaccacgccgacgccgagttccaggagcggctcaaagaagatacgtcttttgggggcaacctcgggcgagcagtcttccaggccaaaaagaggcttcttgaacctcttggtctggttgaggaagcggctaagacggctcctggaaagaagaggcctgtagagcagtctcctcaggaaccggactcctccgcgggtattggcaaatcgggtgcacagcccgctaaaaagagactcaatttcggtcagactggcgacacagagtcagtcccagaccctcaaccaatcggagaacctcccgcagccccctcaggtgtgggatctcttacaatggcttcaggtggtggcgcaccagtggcagacaataacgaaggtgccgatggagtgggtagttcctcgggaaattggcattgcgattcccaatggctgggggacagagtcatcaccaccagcacccgaacctgggccctgcccacctacaacaatcacctctacaagcaaatctccaacagcacatctggaggatcttcaaatgacaacgcctacttcggctacagcaccccctgggggtattttgacttcaacagattccactgccacttctcaccacgtgactggcagcgactcatcaacaacaactggggattccggcctaagcgactcaacttcaagctcttcaacattcaggtcaaagaggttacggacaacaatggagtcaagaccatcgccaataaccttaccagcacggtccaggtcttcacggactcagactatcagctcccgtacgtgctcgggtcggctcacgagggctgcctcccgccgttcccagcggacgttttcatgattcctcagtacgggtatctgacgcttaatgatggaagccaggccgtgggtcgttcgtccttttactgcctggaatatttcccgtcgcaaatgctaagaacgggtaacaacttccagttcagctacgagtttgagaacgtacctttccatagcagctacagacacagccaaagcctggaccgactaatgaatccactcatcgaccaatacttgtactatctctcaaagactattaacggttctggacagaatcaacaaacgctaaaattcagtgtggccggacccagcaacatggctgtccagggaagaaactacatacctggacccagctaccgacaacaacgtgtctcaaccactgtgactcaaaacaacaacagcgaatttgcttggcctggagcttcttcttgggctctcaatggacgtaatagcttgatgaatcctggacctgctatggccagccacaaagaaggagaggaccgtttctttcctttgtctggatctttaatttttggcaaacaaggaactggaagagacaacgtggatgcggacaaagtcatgataaccaacgaagaagaaattaaaactactaacccggtagcaacggagtcctatggacaagtggccacaaaccaccagagtgcccaagcacaggcgcagaccggctgggttcaaaaccaaggaatacttccgggtatggtttggcaggacagagatgtgtacctgcaaggacccatttgggccaaaattcctcacacggacggcaactttcacccttctccgctgatgggagggtttggaatgaagcacccgcctcctcagatcctcatcaaaaacacacctgtacctgcggatcctccaacggccttcaacaaggacaagctgaactctttcatcacccagtattctactggccaagtcagcgtggagatcgagtgggagctgcagaaggaaaacagcaagcgctggaacccggagatccagtacacttccaactattacaagtctaataatgttgaatttgctgttaatactgaaggtgtatatagtgaaccccgccccattggcaccagatacctgactcgtaatctgtaa

SEQ ID NO: 320 - protein, 736 aa, synthetic construct
MAADGYLPDWLEDNLSEGIREWWALKPGAPQPKANQQHQDNARGLVLPGYKYLGPGNGLDKGEPVNAADAAALEHDKAYDQQLKAGDNPYLKYNHADAEFQERLKEDTSFGGNLGRAVFQAKKRLLEPLGLVEEAAKTAPGKKRPVEQSPQEPDSSAGIGKSGAQPAKKRLNFGQTGDTESVPDPQPIGEPPAAPSGVGSLTMASGGGAPVADNNEGADGVGSSSGNWHCDSQWLGDRVITTSTRTWALPTYNNHLYKQISNSTSGGSSNDNAYFGYSTPWGYFDFNRFHCHFSPRDWQRLINNNWGFRPKRLNFKLFNIQVKEVTDNNGVKTIANNLTSTVQVFTDSDYQLPYVLGSAHEGCLPPFPADVFMIPQYGYLTLNDGSQAVGRSSFYCLEYFPSQMLRTGNNFQFSYEFENVPFHSSYRHSQSLDRLMNPLIDQYLYYLSKTINGSGQNQQTLKFSVAGPSNMAVQGRNYIPGPSYRQQRVSTTVTQNNNSEFAWPGASSWALNGRNSLMNPGPAMASHKEGEDRFFPLSGSLIFGKQGTGRDNVDADKVMITNEEEIKTTNPVATESYGQVATNHQSAQAQAQTGWVQNQGILPGMVWQDRDVYLQGPIWAKIPHTDGNFHPSPLMGGFGMKHPPPQILIKNTPVPADPPTAFNKDKLNSFITQYSTGQVSVEIEWELQKENSKRWNPEIQYTSNYYKSNNVEFAVNTEGVYSEPRPIGTRYLTRNL

SEQ ID NO: 321 - DNA, 1800 bp, synthetic construct
  source 1..1800: mol_type = other DNA
acggctcctggaaagaagaggcctgtagagcagtctcctcaggaaccggactcctccgcgggtattggcaaatcgggtgcacagcccgctaaaaagagactcaatttcggtcagactggcgacacagagtcagtcccagaccctcaaccaatcggagaacctcccgcagccccctcaggtgtgggatctcttacaatggcttcaggtggtggcgcaccagtggcagacaataacgaaggtgccgatggagtgggtagttcctcgggaaattggcattgcgattcccaatggctgggggacagagtcatcaccaccagcacccgaacctgggccctgcccacctacaacaatcacctctacaagcaaatctccaacagcacatctggaggatcttcaaatgacaacgcctacttcggctacagcaccccctgggggtattttgacttcaacagattccactgccacttctcaccacgtgactggcagcgactcatcaacaacaactggggattccggcctaagcgactcaacttcaagctcttcaacattcaggtcaaagaggttacggacaacaatggagtcaagaccatcgccaataaccttaccagcacggtccaggtcttcacggactcagactatcagctcccgtacgtgctcgggtcggctcacgagggctgcctcccgccgttcccagcggacgttttcatgattcctcagtacgggtatctgacgcttaatgatggaagccaggccgtgggtcgttcgtccttttactgcctggaatatttcccgtcgcaaatgctaagaacgggtaacaacttccagttcagctacgagtttgagaacgtacctttccatagcagctacagacacagccaaagcctggaccgactaatgaatccactcatcgaccaatacttgtactatctctcaaagactattaacggttctggacagaatcaacaaacgctaaaattcagtgtggccggacccagcaacatggctgtccagggaagaaactacatacctggacccagctaccgacaacaacgtgtctcaaccactgtgactcaaaacaacaacagcgaatttgcttggcctggagcttcttcttgggctctcaatggacgtaatagcttgatgaatcctggacctgctatggccagccacaaagaaggagaggaccgtttctttcctttgtctggatctttaatttttggcaaacaaggaactggaagagacaacgtggatgcggacaaagtcatgataaccaacgaagaagaaattaaaactactaacccggtagcaacggagtcctatggacaagtggccacaaaccaccagagtgcccaagcacaggcgcagaccggctgggttcaaaaccaaggaatacttccgggtatggtttggcaggacagagatgtgtacctgcaaggacccatttgggccaaaattcctcacacggacggcaactttcacccttctccgctgatgggagggtttggaatgaagcacccgcctcctcagatcctcatcaaaaacacacctgtacctgcggatcctccaacggccttcaacaaggacaagctgaactctttcatcacccagtattctactggccaagtcagcgtggagatcgagtgggagctgcagaaggaaaacagcaagcgctggaacccggagatccagtacacttccaactattacaagtctaataatgttgaatttgctgttaatactgaaggtgtatatagtgaaccccgccccattggcaccagatacctgactcgtaatctgtaa

SEQ ID NO: 322 - protein, 599 aa, synthetic construct
TAPGKKRPVEQSPQEPDSSAGIGKSGAQPAKKRLNFGQTGDTESVPDPQPIGEPPAAPSGVGSLTMASGGGAPVADNNEGADGVGSSSGNWHCDSQWLGDRVITTSTRTWALPTYNNHLYKQISNSTSGGSSNDNAYFGYSTPWGYFDFNRFHCHFSPRDWQRLINNNWGFRPKRLNFKLFNIQVKEVTDNNGVKTIANNLTSTVQVFTDSDYQLPYVLGSAHEGCLPPFPADVFMIPQYGYLTLNDGSQAVGRSSFYCLEYFPSQMLRTGNNFQFSYEFENVPFHSSYRHSQSLDRLMNPLIDQYLYYLSKTINGSGQNQQTLKFSVAGPSNMAVQGRNYIPGPSYRQQRVSTTVTQNNNSEFAWPGASSWALNGRNSLMNPGPAMASHKEGEDRFFPLSGSLIFGKQGTGRDNVDADKVMITNEEEIKTTNPVATESYGQVATNHQSAQAQAQTGWVQNQGILPGMVWQDRDVYLQGPIWAKIPHTDGNFHPSPLMGGFGMKHPPPQILIKNTPVPADPPTAFNKDKLNSFITQYSTGQVSVEIEWELQKENSKRWNPEIQYTSNYYKSNNVEFAVNTEGVYSEPRPIGTRYLTRNL

SEQ ID NO: 323 - DNA, 1605 bp, synthetic construct
  source 1..1605: mol_type = other DNA
atggcttcaggtggtggcgcaccagtggcagacaataacgaaggtgccgatggagtgggtagttcctcgggaaattggcattgcgattcccaatggctgggggacagagtcatcaccaccagcacccgaacctgggccctgcccacctacaacaatcacctctacaagcaaatctccaacagcacatctggaggatcttcaaatgacaacgcctacttcggctacagcaccccctgggggtattttgacttcaacagattccactgccacttctcaccacgtgactggcagcgactcatcaacaacaactggggattccggcctaagcgactcaacttcaagctcttcaacattcaggtcaaagaggttacggacaacaatggagtcaagaccatcgccaataaccttaccagcacggtccaggtcttcacggactcagactatcagctcccgtacgtgctcgggtcggctcacgagggctgcctcccgccgttcccagcggacgttttcatgattcctcagtacgggtatctgacgcttaatgatggaagccaggccgtgggtcgttcgtccttttactgcctggaatatttcccgtcgcaaatgctaagaacgggtaacaacttccagttcagctacgagtttgagaacgtacctttccatagcagctacagacacagccaaagcctggaccgactaatgaatccactcatcgaccaatacttgtactatctctcaaagactattaacggttctggacagaatcaacaaacgctaaaattcagtgtggccggacccagcaacatggctgtccagggaagaaactacatacctggacccagctaccgacaacaacgtgtctcaaccactgtgactcaaaacaacaacagcgaatttgcttggcctggagcttcttcttgggctctcaatggacgtaatagcttgatgaatcctggacctgctatggccagccacaaagaaggagaggaccgtttctttcctttgtctggatctttaatttttggcaaacaaggaactggaagagacaacgtggatgcggacaaagtcatgataaccaacgaagaagaaattaaaactactaacccggtagcaacggagtcctatggacaagtggccacaaaccaccagagtgcccaagcacaggcgcagaccggctgggttcaaaaccaaggaatacttccgggtatggtttggcaggacagagatgtgtacctgcaaggacccatttgggccaaaattcctcacacggacggcaactttcacccttctccgctgatgggagggtttggaatgaagcacccgcctcctcagatcctcatcaaaaacacacctgtacctgcggatcctccaacggccttcaacaaggacaagctgaactctttcatcacccagtattctactggccaagtcagcgtggagatcgagtgggagctgcagaaggaaaacagcaagcgctggaacccggagatccagtacacttccaactattacaagtctaataatgttgaatttgctgttaatactgaaggtgtatatagtgaaccccgccccattggcaccagatacctgactcgtaatctgtaa

SEQ ID NO: 324 - protein, 534 aa, synthetic construct
MASGGGAPVADNNEGADGVGSSSGNWHCDSQWLGDRVITTSTRTWALPTYNNHLYKQISNSTSGGSSNDNAYFGYSTPWGYFDFNRFHCHFSPRDWQRLINNNWGFRPKRLNFKLFNIQVKEVTDNNGVKTIANNLTSTVQVFTDSDYQLPYVLGSAHEGCLPPFPADVFMIPQYGYLTLNDGSQAVGRSSFYCLEYFPSQMLRTGNNFQFSYEFENVPFHSSYRHSQSLDRLMNPLIDQYLYYLSKTINGSGQNQQTLKFSVAGPSNMAVQGRNYIPGPSYRQQRVSTTVTQNNNSEFAWPGASSWALNGRNSLMNPGPAMASHKEGEDRFFPLSGSLIFGKQGTGRDNVDADKVMITNEEEIKTTNPVATESYGQVATNHQSAQAQAQTGWVQNQGILPGMVWQDRDVYLQGPIWAKIPHTDGNFHPSPLMGGFGMKHPPPQILIKNTPVPADPPTAFNKDKLNSFITQYSTGQVSVEIEWELQKENSKRWNPEIQYTSNYYKSNNVEFAVNTEGVYSEPRPIGTRYLTRNL

SEQ ID NO: 325 - DNA, 2211 bp, synthetic construct
  source 1..2211: mol_type = other DNA
atggctgccgatggttatcttccagattggctcgaggacaaccttagtgaaggaattcgcgagtggtgggctttgaaacctggagcccctcaacccaaggcaaatcaacaacatcaagacaacgctcgaggtcttgtgcttccgggttacaaataccttggacccggcaacggactcgacaagggggagccggtcaacgcagcagacgcggcggccctcgagcacgacaaggcctacgaccagcagctcaaggccggagacaacccgtacctcaagtacaaccacgccgacgccgagttccaggagcggctcaaagaagatacgtcttttgggggcaacctcgggcgagcagtcttccaggccaaaaagaggcttcttgaacctcttggtctggttgaggaagcggctaagacggctcctggaaagaagaggcctgtagagcagtctcctcaggaaccggactcctccgcgggtattggcaaatcgggtgcacagcccgctaaaaagagactcaatttcggtcagactggcgacacagagtcagtcccagaccctcaaccaatcggagaacctcccgcagccccctcaggtgtgggatctcttacaatggcttcaggtggtggcgcaccagtggcagacaataacgaaggtgccgatggagtgggtagttcctcgggaaattggcattgcgattcccaatggctgggggacagagtcatcaccaccagcacccgaacctgggccctgcccacctacaacaatcacctctacaagcaaatctccaacagcacatctggaggatcttcaaatgacaacgcctacttcggctacagcaccccctgggggtattttgacttcaacagattccactgccacttctcaccacgtgactggcagcgactcatcaacaacaactggggattccggcctaagcgactcaacttcaagctcttcaacattcaggtcaaagaggttacggacaacaatggagtcaagaccatcgccaataaccttaccagcacggtccaggtcttcacggactcagactatcagctcccgtacgtgctcgggtcggctcacgagggctgcctcccgccgttcccagcggacgttttcatgattcctcagtacgggtatctgacgcttaatgatggaagccaggccgtgggtcgttcgtccttttactgcctggaatatttcccgtcgcaaatgctaagaacgggtaacaacttccagttcagctacgagtttgagaacgtacctttccatagcagctacgctcacagccaaagcctggaccgactaatgaatccactcatcgaccaatacttgtactatctctcaaagactattaacggttctggacagaatcaacaaacgctaaaattcagtgtggccggacccagcaacatggctgtccagggaagaaactacatacctggacccagctaccgacaacaacgtgtctcaaccactgtgactcaaaacaacaacagcgaatttgcttggcctggagcttcttcttgggctctcaatggacgtaatagcttgatgaatcctggacctgctatggccagccacaaagaaggagaggaccgtttctttcctttgtctggatctttaatttttggcaaacaaggaactggaagagacaacgtggatgcggacaaagtcatgataaccaacgaagaagaaattaaaactactaacccggtagcaacggagtcctatggacaagtggccacaaaccaccagagtgcccaagcacaggcgcagaccggctgggttcaaaaccaaggaatacttccgggtatggtttggcaggacagagatgtgtacctgcaaggacccatttgggccaaaattcctcacacggacggcaactttcacccttctccgctggatggagggtttggaatgaagcacccgcctcctcagatcctcatcaaaaacacacctgtacctgcggatcctccaacggccttcaacaaggacaagctgaactctttcatcacccagtattctactggccaagtcagcgtggagatcgagtgggagctgcagaaggaaaacagcaagcgctggaacccggagatccagtacacttccaactattacaagtctaataatgttgaatttgctgttaatactgaaggtgtatatagtgaaccccgccccattggcaccagatacctgactcgtaatctgtaa

SEQ ID NO: 326 - protein, 736 aa, synthetic construct
MAADGYLPDWLEDNLSEGIREWWALKPGAPQPKANQQHQDNARGLVLPGYKYLGPGNGLDKGEPVNAADAAALEHDKAYDQQLKAGDNPYLKYNHADAEFQERLKEDTSFGGNLGRAVFQAKKRLLEPLGLVEEAAKTAPGKKRPVEQSPQEPDSSAGIGKSGAQPAKKRLNFGQTGDTESVPDPQPIGEPPAAPSGVGSLTMASGGGAPVADNNEGADGVGSSSGNWHCDSQWLGDRVITTSTRTWALPTYNNHLYKQISNSTSGGSSNDNAYFGYSTPWGYFDFNRFHCHFSPRDWQRLINNNWGFRPKRLNFKLFNIQVKEVTDNNGVKTIANNLTSTVQVFTDSDYQLPYVLGSAHEGCLPPFPADVFMIPQYGYLTLNDGSQAVGRSSFYCLEYFPSQMLRTGNNFQFSYEFENVPFHSSYAHSQSLDRLMNPLIDQYLYYLSKTINGSGQNQQTLKFSVAGPSNMAVQGRNYIPGPSYRQQRVSTTVTQNNNSEFAWPGASSWALNGRNSLMNPGPAMASHKEGEDRFFPLSGSLIFGKQGTGRDNVDADKVMITNEEEIKTTNPVATESYGQVATNHQSAQAQAQTGWVQNQGILPGMVWQDRDVYLQGPIWAKIPHTDGNFHPSPLDGGFGMKHPPPQILIKNTPVPADPPTAFNKDKLNSFITQYSTGQVSVEIEWELQKENSKRWNPEIQYTSNYYKSNNVEFAVNTEGVYSEPRPIGTRYLTRNL

SEQ ID NO: 327 - DNA, 1800 bp, synthetic construct
  source 1..1800: mol_type = other DNA
acggctcctggaaagaagaggcctgtagagcagtctcctcaggaaccggactcctccgcgggtattggcaaatcgggtgcacagcccgctaaaaagagactcaatttcggtcagactggcgacacagagtcagtcccagaccctcaaccaatcggagaacctcccgcagccccctcaggtgtgggatctcttacaatggcttcaggtggtggcgcaccagtggcagacaataacgaaggtgccgatggagtgggtagttcctcgggaaattggcattgcgattcccaatggctgggggacagagtcatcaccaccagcacccgaacctgggccctgcccacctacaacaatcacctctacaagcaaatctccaacagcacatctggaggatcttcaaatgacaacgcctacttcggctacagcaccccctgggggtattttgacttcaacagattccactgccacttctcaccacgtgactggcagcgactcatcaacaacaactggggattccggcctaagcgactcaacttcaagctcttcaacattcaggtcaaagaggttacggacaacaatggagtcaagaccatcgccaataaccttaccagcacggtccaggtcttcacggactcagactatcagctcccgtacgtgctcgggtcggctcacgagggctgcctcccgccgttcccagcggacgttttcatgattcctcagtacgggtatctgacgcttaatgatggaagccaggccgtgggtcgttcgtccttttactgcctggaatatttcccgtcgcaaatgctaagaacgggtaacaacttccagttcagctacgagtttgagaacgtacctttccatagcagctacgctcacagccaaagcctggaccgactaatgaatccactcatcgaccaatacttgtactatctctcaaagactattaacggttctggacagaatcaacaaacgctaaaattcagtgtggccggacccagcaacatggctgtccagggaagaaactacatacctggacccagctaccgacaacaacgtgtctcaaccactgtgactcaaaacaacaacagcgaatttgcttggcctggagcttcttcttgggctctcaatggacgtaatagcttgatgaatcctggacctgctatggccagccacaaagaaggagaggaccgtttctttcctttgtctggatctttaatttttggcaaacaaggaactggaagagacaacgtggatgcggacaaagtcatgataaccaacgaagaagaaattaaaactactaacccggtagcaacggagtcctatggacaagtggccacaaaccaccagagtgcccaagcacaggcgcagaccggctgggttcaaaaccaaggaatacttccgggtatggtttggcaggacagagatgtgtacctgcaaggacccatttgggccaaaattcctcacacggacggcaactttcacccttctccgctggatggagggtttggaatgaagcacccgcctcctcagatcctcatcaaaaacacacctgtacctgcggatcctccaacggccttcaacaaggacaagctgaactctttcatcacccagtattctactggccaagtcagcgtggagatcgagtgggagctgcagaaggaaaacagcaagcgctggaacccggagatccagtacacttccaactattacaagtctaataatgttgaatttgctgttaatactgaaggtgtatatagtgaaccccgccccattggcaccagatacctgactcgtaatctgtaa

SEQ ID NO: 328 - protein, 599 aa, synthetic construct
TAPGKKRPVEQSPQEPDSSAGIGKSGAQPAKKRLNFGQTGDTESVPDPQPIGEPPAAPSGVGSLTMASGGGAPVADNNEGADGVGSSSGNWHCDSQWLGDRVITTSTRTWALPTYNNHLYKQISNSTSGGSSNDNAYFGYSTPWGYFDFNRFHCHFSPRDWQRLINNNWGFRPKRLNFKLFNIQVKEVTDNNGVKTIANNLTSTVQVFTDSDYQLPYVLGSAHEGCLPPFPADVFMIPQYGYLTLNDGSQAVGRSSFYCLEYFPSQMLRTGNNFQFSYEFENVPFHSSYAHSQSLDRLMNPLIDQYLYYLSKTINGSGQNQQTLKFSVAGPSNMAVQGRNYIPGPSYRQQRVSTTVTQNNNSEFAWPGASSWALNGRNSLMNPGPAMASHKEGEDRFFPLSGSLIFGKQGTGRDNVDADKVMITNEEEIKTTNPVATESYGQVATNHQSAQAQAQTGWVQNQGILPGMVWQDRDVYLQGPIWAKIPHTDGNFHPSPLDGGFGMKHPPPQILIKNTPVPADPPTAFNKDKLNSFITQYSTGQVSVEIEWELQKENSKRWNPEIQYTSNYYKSNNVEFAVNTEGVYSEPRPIGTRYLTRNL

SEQ ID NO: 329 - DNA, 1605 bp, synthetic construct
  source 1..1605: mol_type = other DNA
atggcttcaggtggtggcgcaccagtggcagacaataacgaaggtgccgatggagtgggtagttcctcgggaaattggcattgcgattcccaatggctgggggacagagtcatcaccaccagcacccgaacctgggccctgcccacctacaacaatcacctctacaagcaaatctccaacagcacatctggaggatcttcaaatgacaacgcctacttcggctacagcaccccctgggggtattttgacttcaacagattccactgccacttctcaccacgtgactggcagcgactcatcaacaacaactggggattccggcctaagcgactcaacttcaagctcttcaacattcaggtcaaagaggttacggacaacaatggagtcaagaccatcgccaataaccttaccagcacggtccaggtcttcacggactcagactatcagctcccgtacgtgctcgggtcggctcacgagggctgcctcccgccgttcccagcggacgttttcatgattcctcagtacgggtatctgacgcttaatgatggaagccaggccgtgggtcgttcgtccttttactgcctggaatatttcccgtcgcaaatgctaagaacgggtaacaacttccagttcagctacgagtttgagaacgtacctttccatagcagctacgctcacagccaaagcctggaccgactaatgaatccactcatcgaccaatacttgtactatctctcaaagactattaacggttctggacagaatcaacaaacgctaaaattcagtgtggccggacccagcaacatggctgtccagggaagaaactacatacctggacccagctaccgacaacaacgtgtctcaaccactgtgactcaaaacaacaacagcgaatttgcttggcctggagcttcttcttgggctctcaatggacgtaatagcttgatgaatcctggacctgctatggccagccacaaagaaggagaggaccgtttctttcctttgtctggatctttaatttttggcaaacaaggaactggaagagacaacgtggatgcggacaaagtcatgataaccaacgaagaagaaattaaaactactaacccggtagcaacggagtcctatggacaagtggccacaaaccaccagagtgcccaagcacaggcgcagaccggctgggttcaaaaccaaggaatacttccgggtatggtttggcaggacagagatgtgtacctgcaaggacccatttgggccaaaattcctcacacggacggcaactttcacccttctccgctggatggagggtttggaatgaagcacccgcctcctcagatcctcatcaaaaacacacctgtacctgcggatcctccaacggccttcaacaaggacaagctgaactctttcatcacccagtattctactggccaagtcagcgtggagatcgagtgggagctgcagaaggaaaacagcaagcgctggaacccggagatccagtacacttccaactattacaagtctaataatgttgaatttgctgttaatactgaaggtgtatatagtgaaccccgccccattggcaccagatacctgactcgtaatctgtaa

SEQ ID NO: 330 - protein, 534 aa, synthetic construct
MASGGGAPVADNNEGADGVGSSSGNWHCDSQWLGDRVITTSTRTWALPTYNNHLYKQISNSTSGGSSNDNAYFGYSTPWGYFDFNRFHCHFSPRDWQRLINNNWGFRPKRLNFKLFNIQVKEVTDNNGVKTIANNLTSTVQVFTDSDYQLPYVLGSAHEGCLPPFPADVFMIPQYGYLTLNDGSQAVGRSSFYCLEYFPSQMLRTGNNFQFSYEFENVPFHSSYAHSQSLDRLMNPLIDQYLYYLSKTINGSGQNQQTLKFSVAGPSNMAVQGRNYIPGPSYRQQRVSTTVTQNNNSEFAWPGASSWALNGRNSLMNPGPAMASHKEGEDRFFPLSGSLIFGKQGTGRDNVDADKVMITNEEEIKTTNPVATESYGQVATNHQSAQAQAQTGWVQNQGILPGMVWQDRDVYLQGPIWAKIPHTDGNFHPSPLDGGFGMKHPPPQILIKNTPVPADPPTAFNKDKLNSFITQYSTGQVSVEIEWELQKENSKRWNPEIQYTSNYYKSNNVEFAVNTEGVYSEPRPIGTRYLTRNL

SEQ ID NO: 331 - DNA, 2211 bp, synthetic construct
  source 1..2211: mol_type = other DNA
atggctgccgatggttatcttccagattggctcgaggacaaccttagtgaaggaattcgcgagtggtgggctttgaaacctggagcccctcaacccaaggcaaatcaacaacatcaagacaacgctcgaggtcttgtgcttccgggttacaaataccttggacccggcaacggactcgacaagggggagccggtcaacgcagcagacgcggcggccctcgagcacgacaaggcctacgaccagcagctcaaggccggagacaacccgtacctcaagtacaaccacgccgacgccgagttccaggagcggctcaaagaagatacgtcttttgggggcaacctcgggcgagcagtcttccaggccaaaaagaggcttcttgaacctcttggtctggttgaggaagcggctaagacggctcctggaaagaagaggcctgtagagcagtctcctcaggaaccggactcctccgcgggtattggcaaatcgggtgcacagcccgctaaaaagagactcaatttcggtcagactggcgacacagagtcagtcccagaccctcaaccaatcggagaacctcccgcagccccctcaggtgtgggatctcttacaatggcttcaggtggtggcgcaccagtggcagacaataacgaaggtgccgatggagtgggtagttcctcgggaaattggcattgcgattcccaatggctgggggacagagtcatcaccaccagcacccgaacctgggccctgcccacctacaacaatcacctctacaagcaaatctccaacagcacatctggaggatcttcaaatgacaacgcctacttcggctacagcaccccctgggggtattttgacttcaacagattccactgccacttctcaccacgtgactggcagcgactcatcaacaacaactggggattccggcctaagcgactcaacttcaagctcttcaacattcaggtcaaagaggttacggacaacaatggagtcaagaccatcgccaataaccttaccagcacggtccaggtcttcacggactcagactatcagctcccgtacgtgctcgggtcggctcacgagggctgcctcccgccgttcccagcggacgttttcatgattcctcagtacgggtatctgacgcttaatgatggaagccaggccgtgggtcgttcgtccttttactgcctggaatatttcccgtcgcaaatgctaagaacgggtaacaacttccagttcagctacgagtttgagaacgtacctttccatagcagctacgctcacagccaaagcctggaccgactaatgaatccactcatcgaccaatacagatactatctctcaaagactattaacggttctggacagaatcaacaaacgctaaaattcagtgtggccggacccagcaacatggctgtccagggaagaaactacatacctggacccagctaccgacaacaacgtgtctcaaccactgtgactcaaaacaacaacagcgaatttgcttggcctggagcttcttcttgggctctcaatggacgtaatagcttgatgaatcctggacctgctatggccagccacaaagaaggagaggaccgtttctttcctttgtctggatctttaatttttggcaaacaaggaactggaagagacaacgtggatgcggacaaagtcatgataaccaacgaagaagaaattaaaactactaacccggtagcaacggagtcctatggacaagtggccacaaaccaccagagtgcccaagcacaggcgcagaccggctgggttcaaaaccaaggaatacttccgggtatggtttggcaggacagagatgtgtacctgcaaggacccatttgggccaaaattcctcacacggacggcaactttcacccttctccgctgatgggagggtttggaatgaagcacccgcctcctcagatcctcatcaaaaacacacctgtacctgcggatcctccaacggccttcaacaaggacaagctgaactctttcatcacccagtattctactggccaagtcagcgtggagatcgagtgggagctgcagaaggaaaacagcaagcgctggaacccggagatccagtacacttccaactattacaagtctaataatgttgaatttgctgttaatactgaaggtgtatatagtgaaccccgccccattggcaccagatacctgactcgtaatctgtaa

SEQ ID NO: 332 - protein, 736 aa, synthetic construct
MAADGYLPDWLEDNLSEGIREWWALKPGAPQPKANQQHQDNARGLVLPGYKYLGPGNGLDKGEPVNAADAAALEHDKAYDQQLKAGDNPYLKYNHADAEFQERLKEDTSFGGNLGRAVFQAKKRLLEPLGLVEEAAKTAPGKKRPVEQSPQEPDSSAGIGKSGAQPAKKRLNFGQTGDTESVPDPQPIGEPPAAPSGVGSLTMASGGGAPVADNNEGADGVGSSSGNWHCDSQWLGDRVITTSTRTWALPTYNNHLYKQISNSTSGGSSNDNAYFGYSTPWGYFDFNRFHCHFSPRDWQRLINNNWGFRPKRLNFKLFNIQVKEVTDNNGVKTIANNLTSTVQVFTDSDYQLPYVLGSAHEGCLPPFPADVFMIPQYGYLTLNDGSQAVGRSSFYCLEYFPSQMLRTGNNFQFSYEFENVPFHSSYAHSQSLDRLMNPLIDQYRYYLSKTINGSGQNQQTLKFSVAGPSNMAVQGRNYIPGPSYRQQRVSTTVTQNNNSEFAWPGASSWALNGRNSLMNPGPAMASHKEGEDRFFPLSGSLIFGKQGTGRDNVDADKVMITNEEEIKTTNPVATESYGQVATNHQSAQAQAQTGWVQNQGILPGMVWQDRDVYLQGPIWAKIPHTDGNFHPSPLMGGFGMKHPPPQILIKNTPVPADPPTAFNKDKLNSFITQYSTGQVSVEIEWELQKENSKRWNPEIQYTSNYYKSNNVEFAVNTEGVYSEPRPIGTRYLTRNL

SEQ ID NO: 333 - DNA, 1800 bp, synthetic construct
  source 1..1800: mol_type = other DNA
acggctcctggaaagaagaggcctgtagagcagtctcctcaggaaccggactcctccgcgggtattggcaaatcgggtgcacagcccgctaaaaagagactcaatttcggtcagactggcgacacagagtcagtcccagaccctcaaccaatcggagaacctcccgcagccccctcaggtgtgggatctcttacaatggcttcaggtggtggcgcaccagtggcagacaataacgaaggtgccgatggagtgggtagttcctcgggaaattggcattgcgattcccaatggctgggggacagagtcatcaccaccagcacccgaacctgggccctgcccacctacaacaatcacctctacaagcaaatctccaacagcacatctggaggatcttcaaatgacaacgcctacttcggctacagcaccccctgggggtattttgacttcaacagattccactgccacttctcaccacgtgactggcagcgactcatcaacaacaactggggattccggcctaagcgactcaacttcaagctcttcaacattcaggtcaaagaggttacggacaacaatggagtcaagaccatcgccaataaccttaccagcacggtccaggtcttcacggactcagactatcagctcccgtacgtgctcgggtcggctcacgagggctgcctcccgccgttcccagcggacgttttcatgattcctcagtacgggtatctgacgcttaatgatggaagccaggccgtgggtcgttcgtccttttactgcctggaatatttcccgtcgcaaatgctaagaacgggtaacaacttccagttcagctacgagtttgagaacgtacctttccatagcagctacgctcacagccaaagcctggaccgactaatgaatccactcatcgaccaatacagatactatctctcaaagactattaacggttctggacagaatcaacaaacgctaaaattcagtgtggccggacccagcaacatggctgtccagggaagaaactacatacctggacccagctaccgacaacaacgtgtctcaaccactgtgactcaaaacaacaacagcgaatttgcttggcctggagcttcttcttgggctctcaatggacgtaatagcttgatgaatcctggacctgctatggccagccacaaagaaggagaggaccgtttctttcctttgtctggatctttaatttttggcaaacaaggaactggaagagacaacgtggatgcggacaaagtcatgataaccaacgaagaagaaattaaaactactaacccggtagcaacggagtcctatggacaagtggccacaaaccaccagagtgcccaagcacaggcgcagaccggctgggttcaaaaccaaggaatacttccgggtatggtttggcaggacagagatgtgtacctgcaaggacccatttgggccaaaattcctcacacggacggcaactttcacccttctccgctgatgggagggtttggaatgaagcacccgcctcctcagatcctcatcaaaaacacacctgtacctgcggatcctccaacggccttcaacaaggacaagctgaactctttcatcacccagtattctactggccaagtcagcgtggagatcgagtgggagctgcagaaggaaaacagcaagcgctggaacccggagatccagtacacttccaactattacaagtctaataatgttgaatttgctgttaatactgaaggtgtatatagtgaaccccgccccattggcaccagatacctgactcgtaatctgtaa

SEQ ID NO: 334 - protein, 599 aa, synthetic construct
TAPGKKRPVEQSPQEPDSSAGIGKSGAQPAKKRLNFGQTGDTESVPDPQPIGEPPAAPSGVGSLTMASGGGAPVADNNEGADGVGSSSGNWHCDSQWLGDRVITTSTRTWALPTYNNHLYKQISNSTSGGSSNDNAYFGYSTPWGYFDFNRFHCHFSPRDWQRLINNNWGFRPKRLNFKLFNIQVKEVTDNNGVKTIANNLTSTVQVFTDSDYQLPYVLGSAHEGCLPPFPADVFMIPQYGYLTLNDGSQAVGRSSFYCLEYFPSQMLRTGNNFQFSYEFENVPFHSSYAHSQSLDRLMNPLIDQYRYYLSKTINGSGQNQQTLKFSVAGPSNMAVQGRNYIPGPSYRQQRVSTTVTQNNNSEFAWPGASSWALNGRNSLMNPGPAMASHKEGEDRFFPLSGSLIFGKQGTGRDNVDADKVMITNEEEIKTTNPVATESYGQVATNHQSAQAQAQTGWVQNQGILPGMVWQDRDVYLQGPIWAKIPHTDGNFHPSPLMGGFGMKHPPPQILIKNTPVPADPPTAFNKDKLNSFITQYSTGQVSVEIEWELQKENSKRWNPEIQYTSNYYKSNNVEFAVNTEGVYSEPRPIGTRYLTRNL

SEQ ID NO: 335 - DNA, 1605 bp, synthetic construct
  source 1..1605: mol_type = other DNA
atggcttcaggtggtggcgcaccagtggcagacaataacgaaggtgccgatggagtgggtagttcctcgggaaattggcattgcgattcccaatggctgggggacagagtcatcaccaccagcacccgaacctgggccctgcccacctacaacaatcacctctacaagcaaatctccaacagcacatctggaggatcttcaaatgacaacgcctacttcggctacagcaccccctgggggtattttgacttcaacagattccactgccacttctcaccacgtgactggcagcgactcatcaacaacaactggggattccggcctaagcgactcaacttcaagctcttcaacattcaggtcaaagaggttacggacaacaatggagtcaagaccatcgccaataaccttaccagcacggtccaggtcttcacggactcagactatcagctcccgtacgtgctcgggtcggctcacgagggctgcctcccgccgttcccagcggacgttttcatgattcctcagtacgggtatctgacgcttaatgatggaagccaggccgtgggtcgttcgtccttttactgcctggaatatttcccgtcgcaaatgctaagaacgggtaacaacttccagttcagctacgagtttgagaacgtacctttccatagcagctacgctcacagccaaagcctggaccgactaatgaatccactcatcgaccaatacagatactatctctcaaagactattaacggttctggacagaatcaacaaacgctaaaattcagtgtggccggacccagcaacatggctgtccagggaagaaactacatacctggacccagctaccgacaacaacgtgtctcaaccactgtgactcaaaacaacaacagcgaatttgcttggcctggagcttcttcttgggctctcaatggacgtaatagcttgatgaatcctggacctgctatggccagccacaaagaaggagaggaccgtttctttcctttgtctggatctttaatttttggcaaacaaggaactggaagagacaacgtggatgcggacaaagtcatgataaccaacgaagaagaaattaaaactactaacccggtagcaacggagtcctatggacaagtggccacaaaccaccagagtgcccaagcacaggcgcagaccggctgggttcaaaaccaaggaatacttccgggtatggtttggcaggacagagatgtgtacctgcaaggacccatttgggccaaaattcctcacacggacggcaactttcacccttctccgctgatgggagggtttggaatgaagcacccgcctcctcagatcctcatcaaaaacacacctgtacctgcggatcctccaacggccttcaacaaggacaagctgaactctttcatcacccagtattctactggccaagtcagcgtggagatcgagtgggagctgcagaaggaaaacagcaagcgctggaacccggagatccagtacacttccaactattacaagtctaataatgttgaatttgctgttaatactgaaggtgtatatagtgaaccccgccccattggcaccagatacctgactcgtaatctgtaa

SEQ ID NO: 336 - protein, 534 aa, synthetic construct
MASGGGAPVADNNEGADGVGSSSGNWHCDSQWLGDRVITTSTRTWALPTYNNHLYKQISNSTSGGSSNDNAYFGYSTPWGYFDFNRFHCHFSPRDWQRLINNNWGFRPKRLNFKLFNIQVKEVTDNNGVKTIANNLTSTVQVFTDSDYQLPYVLGSAHEGCLPPFPADVFMIPQYGYLTLNDGSQAVGRSSFYCLEYFPSQMLRTGNNFQFSYEFENVPFHSSYAHSQSLDRLMNPLIDQYRYYLSKTINGSGQNQQTLKFSVAGPSNMAVQGRNYIPGPSYRQQRVSTTVTQNNNSEFAWPGASSWALNGRNSLMNPGPAMASHKEGEDRFFPLSGSLIFGKQGTGRDNVDADKVMITNEEEIKTTNPVATESYGQVATNHQSAQAQAQTGWVQNQGILPGMVWQDRDVYLQGPIWAKIPHTDGNFHPSPLMGGFGMKHPPPQILIKNTPVPADPPTAFNKDKLNSFITQYSTGQVSVEIEWELQKENSKRWNPEIQYTSNYYKSNNVEFAVNTEGVYSEPRPIGTRYLTRNL

SEQ ID NO: 337 - DNA, 2211 bp, synthetic construct
  source 1..2211: mol_type = other DNA
atggctgccgatggttatcttccagattggctcgaggacaaccttagtgaaggaattcgcgagtggtgggctttgaaacctggagcccctcaacccaaggcaaatcaacaacatcaagacaacgctcgaggtcttgtgcttccgggttacaaataccttggacccggcaacggactcgacaagggggagccggtcaacgcagcagacgcggcggccctcgagcacgacaaggcctacgaccagcagctcaaggccggagacaacccgtacctcaagtacaaccacgccgacgccgagttccaggagcggctcaaagaagatacgtcttttgggggcaacctcgggcgagcagtcttccaggccaaaaagaggcttcttgaacctcttggtctggttgaggaagcggctaagacggctcctggaaagaagaggcctgtagagcagtctcctcaggaaccggactcctccgcgggtattggcaaatcgggtgcacagcccgctaaaaagagactcaatttcggtcagactggcgacacagagtcagtcccagaccctcaaccaatcggagaacctcccgcagccccctcaggtgtgggatctcttacaatggcttcaggtggtggcgcaccagtggcagacaataacgaaggtgccgatggagtgggtagttcctcgggaaattggcattgcgattcccaatggctgggggacagagtcatcaccaccagcacccgaacctgggccctgcccacctacaacaatcacctctacaagcaaatctccaacagcacatctggaggatcttcaaatgacaacgcctacttcggctacagcaccccctgggggtattttgacttcaacagattccactgccacttctcaccacgtgactggcagcgactcatcaacaacaactggggattccggcctaagcgactcaacttcaagctcttcaacattcaggtcaaagaggttacggacaacaatggagtcaagaccatcgccaataaccttaccagcacggtccaggtcttcacggactcagactatcagctcccgtacgtgctcgggtcggctcacgagggctgcctcccgccgttcccagcggacgttttcatgattcctcagtacgggtatctgacgcttaatgatggaagccaggccgtgggtcgttcgtccttttactgcctggaatatttcccgtcgcaaatgctaagaacgggtaacaacttccagttcagctacgagtttgagaacgtacctttccatagcagctacgctcacagccaaagcctggaccgactaatgaatccactcatcgaccaatacttgtactatctctcaaagactattaacggttctggacagaatcaacaaacgctaaaattcagtgtggccggacccagcaacatggctgtccagggaagaaactacatacctggacccagctaccgacaacaacgtgtctcaaccactgtgactcaaaacaacaacagcgaatttgcttggcctggagcttcttcttgggctctcaatggacgtaatagcttgatgaatcctggacctgctatggccagccacaaagaaggagaggaccgtttctttcctttgtctggatctttaatttttggcaaacaaggaactggaagagacaacgtggatgcggacaaagtcatgataaccaacgaagaagaaattaaaactactaacccggtagcaacggagtcctatggacaagtggccacaaaccaccagagtgcccaagcacaggcgcagaccggctgggttcaaaaccaaggaatacttccgaatatggtttggcaggacagagatgtgtacctgcaaggacccatttgggccaaaattcctcacacggacggcaactttcacccttctccgctgatgggagggtttggaatgaagcacccgcctcctcagatcctcatcaaaaacacacctgtacctgcggatcctccaacggccttcaacaaggacaagctgaactctttcatcacccagtattctactggccaagtcagcgtggagatcgagtgggagctgcagaaggaaaacagcaagcgctggaacccggagatccagtacacttccaactattacaagtctaataatgttgaatttgctgttaatactgaaggtgtatatagtgaaccccgccccattggcaccagatacctgactcgtaatctgtaa

SEQ ID NO: 338 - protein, 736 aa, synthetic construct
MAADGYLPDWLEDNLSEGIREWWALKPGAPQPKANQQHQDNARGLVLPGYKYLGPGNGLDKGEPVNAADAAALEHDKAYDQQLKAGDNPYLKYNHADAEFQERLKEDTSFGGNLGRAVFQAKKRLLEPLGLVEEAAKTAPGKKRPVEQSPQEPDSSAGIGKSGAQPAKKRLNFGQTGDTESVPDPQPIGEPPAAPSGVGSLTMASGGGAPVADNNEGADGVGSSSGNWHCDSQWLGDRVITTSTRTWALPTYNNHLYKQISNSTSGGSSNDNAYFGYSTPWGYFDFNRFHCHFSPRDWQRLINNNWGFRPKRLNFKLFNIQVKEVTDNNGVKTIANNLTSTVQVFTDSDYQLPYVLGSAHEGCLPPFPADVFMIPQYGYLTLNDGSQAVGRSSFYCLEYFPSQMLRTGNNFQFSYEFENVPFHSSYAHSQSLDRLMNPLIDQYLYYLSKTINGSGQNQQTLKFSVAGPSNMAVQGRNYIPGPSYRQQRVSTTVTQNNNSEFAWPGASSWALNGRNSLMNPGPAMASHKEGEDRFFPLSGSLIFGKQGTGRDNVDADKVMITNEEEIKTTNPVATESYGQVATNHQSAQAQAQTGWVQNQGILPNMVWQDRDVYLQGPIWAKIPHTDGNFHPSPLMGGFGMKHPPPQILIKNTPVPADPPTAFNKDKLNSFITQYSTGQVSVEIEWELQKENSKRWNPEIQYTSNYYKSNNVEFAVNTEGVYSEPRPIGTRYLTRNL

SEQ ID NO: 339 - DNA, 1800 bp, synthetic construct
  source 1..1800: mol_type = other DNA
acggctcctggaaagaagaggcctgtagagcagtctcctcaggaaccggactcctccgcgggtattggcaaatcgggtgcacagcccgctaaaaagagactcaatttcggtcagactggcgacacagagtcagtcccagaccctcaaccaatcggagaacctcccgcagccccctcaggtgtgggatctcttacaatggcttcaggtggtggcgcaccagtggcagacaataacgaaggtgccgatggagtgggtagttcctcgggaaattggcattgcgattcccaatggctgggggacagagtcatcaccaccagcacccgaacctgggccctgcccacctacaacaatcacctctacaagcaaatctccaacagcacatctggaggatcttcaaatgacaacgcctacttcggctacagcaccccctgggggtattttgacttcaacagattccactgccacttctcaccacgtgactggcagcgactcatcaacaacaactggggattccggcctaagcgactcaacttcaagctcttcaacattcaggtcaaagaggttacggacaacaatggagtcaagaccatcgccaataaccttaccagcacggtccaggtcttcacggactcagactatcagctcccgtacgtgctcgggtcggctcacgagggctgcctcccgccgttcccagcggacgttttcatgattcctcagtacgggtatctgacgcttaatgatggaagccaggccgtgggtcgttcgtccttttactgcctggaatatttcccgtcgcaaatgctaagaacgggtaacaacttccagttcagctacgagtttgagaacgtacctttccatagcagctacgctcacagccaaagcctggaccgactaatgaatccactcatcgaccaatacttgtactatctctcaaagactattaacggttctggacagaatcaacaaacgctaaaattcagtgtggccggacccagcaacatggctgtccagggaagaaactacatacctggacccagctaccgacaacaacgtgtctcaaccactgtgactcaaaacaacaacagcgaatttgcttggcctggagcttcttcttgggctctcaatggacgtaatagcttgatgaatcctggacctgctatggccagccacaaagaaggagaggaccgtttctttcctttgtctggatctttaatttttggcaaacaaggaactggaagagacaacgtggatgcggacaaagtcatgataaccaacgaagaagaaattaaaactactaacccggtagcaacggagtcctatggacaagtggccacaaaccaccagagtgcccaagcacaggcgcagaccggctgggttcaaaaccaaggaatacttccgaatatggtttggcaggacagagatgtgtacctgcaaggacccatttgggccaaaattcctcacacggacggcaactttcacccttctccgctgatgggagggtttggaatgaagcacccgcctcctcagatcctcatcaaaaacacacctgtacctgcggatcctccaacggccttcaacaaggacaagctgaactctttcatcacccagtattctactggccaagtcagcgtggagatcgagtgggagctgcagaaggaaaacagcaagcgctggaacccggagatccagtacacttccaactattacaagtctaataatgttgaatttgctgttaatactgaaggtgtatatagtgaaccccgccccattggcaccagatacctgactcgtaatctgtaa

SEQ ID NO: 340 - protein, 599 aa, synthetic construct
TAPGKKRPVEQSPQEPDSSAGIGKSGAQPAKKRLNFGQTGDTESVPDPQPIGEPPAAPSGVGSLTMASGGGAPVADNNEGADGVGSSSGNWHCDSQWLGDRVITTSTRTWALPTYNNHLYKQISNSTSGGSSNDNAYFGYSTPWGYFDFNRFHCHFSPRDWQRLINNNWGFRPKRLNFKLFNIQVKEVTDNNGVKTIANNLTSTVQVFTDSDYQLPYVLGSAHEGCLPPFPADVFMIPQYGYLTLNDGSQAVGRSSFYCLEYFPSQMLRTGNNFQFSYEFENVPFHSSYAHSQSLDRLMNPLIDQYLYYLSKTINGSGQNQQTLKFSVAGPSNMAVQGRNYIPGPSYRQQRVSTTVTQNNNSEFAWPGASSWALNGRNSLMNPGPAMASHKEGEDRFFPLSGSLIFGKQGTGRDNVDADKVMITNEEEIKTTNPVATESYGQVATNHQSAQAQAQTGWVQNQGILPNMVWQDRDVYLQGPIWAKIPHTDGNFHPSPLMGGFGMKHPPPQILIKNTPVPADPPTAFNKDKLNSFITQYSTGQVSVEIEWELQKENSKRWNPEIQYTSNYYKSNNVEFAVNTEGVYSEPRPIGTRYLTRNL

SEQ ID NO: 341 - DNA, 1605 bp, synthetic construct
  source 1..1605: mol_type = other DNA
atggcttcaggtggtggcgcaccagtggcagacaataacgaaggtgccgatggagtgggtagttcctcgggaaattggcattgcgattcccaatggctgggggacagagtcatcaccaccagcacccgaacctgggccctgcccacctacaacaatcacctctacaagcaaatctccaacagcacatctggaggatcttcaaatgacaacgcctacttcggctacagcaccccctgggggtattttgacttcaacagattccactgccacttctcaccacgtgactggcagcgactcatcaacaacaactggggattccggcctaagcgactcaacttcaagctcttcaacattcaggtcaaagaggttacggacaacaatggagtcaagaccatcgccaataaccttaccagcacggtccaggtcttcacggactcagactatcagctcccgtacgtgctcgggtcggctcacgagggctgcctcccgccgttcccagcggacgttttcatgattcctcagtacgggtatctgacgcttaatgatggaagccaggccgtgggtcgttcgtccttttactgcctggaatatttcccgtcgcaaatgctaagaacgggtaacaacttccagttcagctacgagtttgagaacgtacctttccatagcagctacgctcacagccaaagcctggaccgactaatgaatccactcatcgaccaatacttgtactatctctcaaagactattaacggttctggacagaatcaacaaacgctaaaattcagtgtggccggacccagcaacatggctgtccagggaagaaactacatacctggacccagctaccgacaacaacgtgtctcaaccactgtgactcaaaacaacaacagcgaatttgcttggcctggagcttcttcttgggctctcaatggacgtaatagcttgatgaatcctggacctgctatggccagccacaaagaaggagaggaccgtttctttcctttgtctggatctttaatttttggcaaacaaggaactggaagagacaacgtggatgcggacaaagtcatgataaccaacgaagaagaaattaaaactactaacccggtagcaacggagtcctatggacaagtggccacaaaccaccagagtgcccaagcacaggcgcagaccggctgggttcaaaaccaaggaatacttccgaatatggtttggcaggacagagatgtgtacctgcaaggacccatttgggccaaaattcctcacacggacggcaactttcacccttctccgctgatgggagggtttggaatgaagcacccgcctcctcagatcctcatcaaaaacacacctgtacctgcggatcctccaacggccttcaacaaggacaagctgaactctttcatcacccagtattctactggccaagtcagcgtggagatcgagtgggagctgcagaaggaaaacagcaagcgctggaacccggagatccagtacacttccaactattacaagtctaataatgttgaatttgctgttaatactgaaggtgtatatagtgaaccccgccccattggcaccagatacctgactcgtaatctgtaa

SEQ ID NO: 342 - protein, 534 aa, synthetic construct
MASGGGAPVADNNEGADGVGSSSGNWHCDSQWLGDRVITTSTRTWALPTYNNHLYKQISNSTSGGSSNDNAYFGYSTPWGYFDFNRFHCHFSPRDWQRLINNNWGFRPKRLNFKLFNIQVKEVTDNNGVKTIANNLTSTVQVFTDSDYQLPYVLGSAHEGCLPPFPADVFMIPQYGYLTLNDGSQAVGRSSFYCLEYFPSQMLRTGNNFQFSYEFENVPFHSSYAHSQSLDRLMNPLIDQYLYYLSKTINGSGQNQQTLKFSVAGPSNMAVQGRNYIPGPSYRQQRVSTTVTQNNNSEFAWPGASSWALNGRNSLMNPGPAMASHKEGEDRFFPLSGSLIFGKQGTGRDNVDADKVMITNEEEIKTTNPVATESYGQVATNHQSAQAQAQTGWVQNQGILPNMVWQDRDVYLQGPIWAKIPHTDGNFHPSPLMGGFGMKHPPPQILIKNTPVPADPPTAFNKDKLNSFITQYSTGQVSVEIEWELQKENSKRWNPEIQYTSNYYKSNNVEFAVNTEGVYSEPRPIGTRYLTRNL

SEQ ID NO: 343 - DNA, 2211 bp, synthetic construct
  source 1..2211: mol_type = other DNA
atggctgccgatggttatcttccagattggctcgaggacaaccttagtgaaggaattcgcgagtggtgggctttgaaacctggagcccctcaacccaaggcaaatcaacaacatcaagacaacgctcgaggtcttgtgcttccgggttacaaataccttggacccggcaacggactcgacaagggggagccggtcaacgcagcagacgcggcggccctcgagcacgacaaggcctacgaccagcagctcaaggccggagacaacccgtacctcaagtacaaccacgccgacgccgagttccaggagcggctcaaagaagatacgtcttttgggggcaacctcgggcgagcagtcttccaggccaaaaagaggcttcttgaacctcttggtctggttgaggaagcggctaagacggctcctggaaagaagaggcctgtagagcagtctcctcaggaaccggactcctccgcgggtattggcaaatcgggtgcacagcccgctaaaaagagactcaatttcggtcagactggcgacacagagtcagtcccagaccctcaaccaatcggagaacctcccgcagccccctcaggtgtgggatctcttacaatggcttcaggtggtggcgcaccagtggcagacaataacgaaggtgccgatggagtgggtagttcctcgggaaattggcattgcgattcccaatggctgggggacagagtcatcaccaccagcacccgaacctgggccctgcccacctacaacaatcacctctacaagcaaatctccaacagcacatctggaggatcttcaaatgacaacgcctacttcggctacagcaccccctgggggtattttgacttcaacagattccactgccacttctcaccacgtgactggcagcgactcatcaacaacaactggggattccggcctaagcgactcaacttcaagctcttcaacattcaggtcaaagaggttacggacaacaatggagtcaagaccatcgccaataaccttaccagcacggtccaggtcttcacggactcagactatcagctcccgtacgtgctcgggtcggctcacgagggctgcctcccgccgttcccagcggacgttttcatgattcctcagtacgggtatctgacgcttaatgatggaagccaggccgtgggtcgttcgtccttttactgcctggaatatttcccgtcgcaaatgctaagaacgggtaacaacttccagttcagctacgagtttgagaacgtacctttccatagcagctacgctcacagccaaagcctggaccgactaatgaatccactcatcgaccaatacttgtactatctctcaaagactattaacggttctggacagaatcaacaaacgctaaaattcagtgtggccggacccagcaacatggctgtccagggaagaaactacatacctggacccagctaccgacaacaacgtgtctcaaccactgtgactcaaaacaacaacagcgaatttgcttggcctggagcttcttcttgggctctcaatggacgtaatagcttgatgaatcctggacctgctatggccagccacaaagaaggagaggaccgtttctttcctttgtctggatctttaatttttggcaaacaaggaactggaagagacaacgtggatgcggacaaagtcatgataaccaacgaagaagaaattaaaactactaacccggtagcaacggagtcctatggacaagtggccacaaaccaccagagtgcccaagcacaggcgcagaccggctgggttcaaaaccaaggaatacttccgggtatggtttggcaggacagagatgtgtacctgcaaggacccatttgggccaaaattcctcacacggacaagaactttcacccttctccgctgatgggagggtttggaatgaagcacccgcctcctcagatcctcatcaaaaacacacctgtacctgcggatcctccaacggccttcaacaaggacaagctgaactctttcatcacccagtattctactggccaagtcagcgtggagatcgagtgggagctgcagaaggaaaacagcaagcgctggaacccggagatccagtacacttccaactattacaagtctaataatgttgaatttgctgttaatactgaaggtgtatatagtgaaccccgccccattggcaccagatacctgactcgtaatctgtaa

SEQ ID NO: 344 - protein, 736 aa, synthetic construct
MAADGYLPDWLEDNLSEGIREWWALKPGAPQPKANQQHQDNARGLVLPGYKYLGPGNGLDKGEPVNAADAAALEHDKAYDQQLKAGDNPYLKYNHADAEFQERLKEDTSFGGNLGRAVFQAKKRLLEPLGLVEEAAKTAPGKKRPVEQSPQEPDSSAGIGKSGAQPAKKRLNFGQTGDTESVPDPQPIGEPPAAPSGVGSLTMASGGGAPVADNNEGADGVGSSSGNWHCDSQWLGDRVITTSTRTWALPTYNNHLYKQISNSTSGGSSNDNAYFGYSTPWGYFDFNRFHCHFSPRDWQRLINNNWGFRPKRLNFKLFNIQVKEVTDNNGVKTIANNLTSTVQVFTDSDYQLPYVLGSAHEGCLPPFPADVFMIPQYGYLTLNDGSQAVGRSSFYCLEYFPSQMLRTGNNFQFSYEFENVPFHSSYAHSQSLDRLMNPLIDQYLYYLSKTINGSGQNQQTLKFSVAGPSNMAVQGRNYIPGPSYRQQRVSTTVTQNNNSEFAWPGASSWALNGRNSLMNPGPAMASHKEGEDRFFPLSGSLIFGKQGTGRDNVDADKVMITNEEEIKTTNPVATESYGQVATNHQSAQAQAQTGWVQNQGILPGMVWQDRDVYLQGPIWAKIPHTDKNFHPSPLMGGFGMKHPPPQILIKNTPVPADPPTAFNKDKLNSFITQYSTGQVSVEIEWELQKENSKRWNPEIQYTSNYYKSNNVEFAVNTEGVYSEPRPIGTRYLTRNL

SEQ ID NO: 345 - DNA, 1800 bp, synthetic construct
  source 1..1800: mol_type = other DNA
acggctcctggaaagaagaggcctgtagagcagtctcctcaggaaccggactcctccgcgggtattggcaaatcgggtgcacagcccgctaaaaagagactcaatttcggtcagactggcgacacagagtcagtcccagaccctcaaccaatcggagaacctcccgcagccccctcaggtgtgggatctcttacaatggcttcaggtggtggcgcaccagtggcagacaataacgaaggtgccgatggagtgggtagttcctcgggaaattggcattgcgattcccaatggctgggggacagagtcatcaccaccagcacccgaacctgggccctgcccacctacaacaatcacctctacaagcaaatctccaacagcacatctggaggatcttcaaatgacaacgcctacttcggctacagcaccccctgggggtattttgacttcaacagattccactgccacttctcaccacgtgactggcagcgactcatcaacaacaactggggattccggcctaagcgactcaacttcaagctcttcaacattcaggtcaaagaggttacggacaacaatggagtcaagaccatcgccaataaccttaccagcacggtccaggtcttcacggactcagactatcagctcccgtacgtgctcgggtcggctcacgagggctgcctcccgccgttcccagcggacgttttcatgattcctcagtacgggtatctgacgcttaatgatggaagccaggccgtgggtcgttcgtccttttactgcctggaatatttcccgtcgcaaatgctaagaacgggtaacaacttccagttcagctacgagtttgagaacgtacctttccatagcagctacgctcacagccaaagcctggaccgactaatgaatccactcatcgaccaatacttgtactatctctcaaagactattaacggttctggacagaatcaacaaacgctaaaattcagtgtggccggacccagcaacatggctgtccagggaagaaactacatacctggacccagctaccgacaacaacgtgtctcaaccactgtgactcaaaacaacaacagcgaatttgcttggcctggagcttcttcttgggctctcaatggacgtaatagcttgatgaatcctggacctgctatggccagccacaaagaaggagaggaccgtttctttcctttgtctggatctttaatttttggcaaacaaggaactggaagagacaacgtggatgcggacaaagtcatgataaccaacgaagaagaaattaaaactactaacccggtagcaacggagtcctatggacaagtggccacaaaccaccagagtgcccaagcacaggcgcagaccggctgggttcaaaaccaaggaatacttccgggtatggtttggcaggacagagatgtgtacctgcaaggacccatttgggccaaaattcctcacacggacaagaactttcacccttctccgctgatgggagggtttggaatgaagcacccgcctcctcagatcctcatcaaaaacacacctgtacctgcggatcctccaacggccttcaacaaggacaagctgaactctttcatcacccagtattctactggccaagtcagcgtggagatcgagtgggagctgcagaaggaaaacagcaagcgctggaacccggagatccagtacacttccaactattacaagtctaataatgttgaatttgctgttaatactgaaggtgtatatagtgaaccccgccccattggcaccagatacctgactcgtaatctgtaa

SEQ ID NO: 346 - protein, 599 aa, synthetic construct
TAPGKKRPVEQSPQEPDSSAGIGKSGAQPAKKRLNFGQTGDTESVPDPQPIGEPPAAPSGVGSLTMASGGGAPVADNNEGADGVGSSSGNWHCDSQWLGDRVITTSTRTWALPTYNNHLYKQISNSTSGGSSNDNAYFGYSTPWGYFDFNRFHCHFSPRDWQRLINNNWGFRPKRLNFKLFNIQVKEVTDNNGVKTIANNLTSTVQVFTDSDYQLPYVLGSAHEGCLPPFPADVFMIPQYGYLTLNDGSQAVGRSSFYCLEYFPSQMLRTGNNFQFSYEFENVPFHSSYAHSQSLDRLMNPLIDQYLYYLSKTINGSGQNQQTLKFSVAGPSNMAVQGRNYIPGPSYRQQRVSTTVTQNNNSEFAWPGASSWALNGRNSLMNPGPAMASHKEGEDRFFPLSGSLIFGKQGTGRDNVDADKVMITNEEEIKTTNPVATESYGQVATNHQSAQAQAQTGWVQNQGILPGMVWQDRDVYLQGPIWAKIPHTDKNFHPSPLMGGFGMKHPPPQILIKNTPVPADPPTAFNKDKLNSFITQYSTGQVSVEIEWELQKENSKRWNPEIQYTSNYYKSNNVEFAVNTEGVYSEPRPIGTRYLTRNL

SEQ ID NO: 347 - DNA, 1605 bp, synthetic construct
  source 1..1605: mol_type = other DNA
atggcttcaggtggtggcgcaccagtggcagacaataacgaaggtgccgatggagtgggtagttcctcgggaaattggcattgcgattcccaatggctgggggacagagtcatcaccaccagcacccgaacctgggccctgcccacctacaacaatcacctctacaagcaaatctccaacagcacatctggaggatcttcaaatgacaacgcctacttcggctacagcaccccctgggggtattttgacttcaacagattccactgccacttctcaccacgtgactggcagcgactcatcaacaacaactggggattccggcctaagcgactcaacttcaagctcttcaacattcaggtcaaagaggttacggacaacaatggagtcaagaccatcgccaataaccttaccagcacggtccaggtcttcacggactcagactatcagctcccgtacgtgctcgggtcggctcacgagggctgcctcccgccgttcccagcggacgttttcatgattcctcagtacgggtatctgacgcttaatgatggaagccaggccgtgggtcgttcgtccttttactgcctggaatatttcccgtcgcaaatgctaagaacgggtaacaacttccagttcagctacgagtttgagaacgtacctttccatagcagctacgctcacagccaaagcctggaccgactaatgaatccactcatcgaccaatacttgtactatctctcaaagactattaacggttctggacagaatcaacaaacgctaaaattcagtgtggccggacccagcaacatggctgtccagggaagaaactacatacctggacccagctaccgacaacaacgtgtctcaaccactgtgactcaaaacaacaacagcgaatttgcttggcctggagcttcttcttgggctctcaatggacgtaatagcttgatgaatcctggacctgctatggccagccacaaagaaggagaggaccgtttctttcctttgtctggatctttaatttttggcaaacaaggaactggaagagacaacgtggatgcggacaaagtcatgataaccaacgaagaagaaattaaaactactaacccggtagcaacggagtcctatggacaagtggccacaaaccaccagagtgcccaagcacaggcgcagaccggctgggttcaaaaccaaggaatacttccgggtatggtttggcaggacagagatgtgtacctgcaaggacccatttgggccaaaattcctcacacggacaagaactttcacccttctccgctgatgggagggtttggaatgaagcacccgcctcctcagatcctcatcaaaaacacacctgtacctgcggatcctccaacggccttcaacaaggacaagctgaactctttcatcacccagtattctactggccaagtcagcgtggagatcgagtgggagctgcagaaggaaaacagcaagcgctggaacccggagatccagtacacttccaactattacaagtctaataatgttgaatttgctgttaatactgaaggtgtatatagtgaaccccgccccattggcaccagatacctgactcgtaatctgtaa

SEQ ID NO: 348 - protein, 534 aa, synthetic construct
MASGGGAPVADNNEGADGVGSSSGNWHCDSQWLGDRVITTSTRTWALPTYNNHLYKQISNSTSGGSSNDNAYFGYSTPWGYFDFNRFHCHFSPRDWQRLINNNWGFRPKRLNFKLFNIQVKEVTDNNGVKTIANNLTSTVQVFTDSDYQLPYVLGSAHEGCLPPFPADVFMIPQYGYLTLNDGSQAVGRSSFYCLEYFPSQMLRTGNNFQFSYEFENVPFHSSYAHSQSLDRLMNPLIDQYLYYLSKTINGSGQNQQTLKFSVAGPSNMAVQGRNYIPGPSYRQQRVSTTVTQNNNSEFAWPGASSWALNGRNSLMNPGPAMASHKEGEDRFFPLSGSLIFGKQGTGRDNVDADKVMITNEEEIKTTNPVATESYGQVATNHQSAQAQAQTGWVQNQGILPGMVWQDRDVYLQGPIWAKIPHTDKNFHPSPLMGGFGMKHPPPQILIKNTPVPADPPTAFNKDKLNSFITQYSTGQVSVEIEWELQKENSKRWNPEIQYTSNYYKSNNVEFAVNTEGVYSEPRPIGTRYLTRNL

SEQ ID NO: 349 - DNA, 2211 bp, synthetic construct
  source 1..2211: mol_type = other DNA
atggctgccgatggttatcttccagattggctcgaggacaaccttagtgaaggaattcgcgagtggtgggctttgaaacctggagcccctcaacccaaggcaaatcaacaacatcaagacaacgctcgaggtcttgtgcttccgggttacaaataccttggacccggcaacggactcgacaagggggagccggtcaacgcagcagacgcggcggccctcgagcacgacaaggcctacgaccagcagctcaaggccggagacaacccgtacctcaagtacaaccacgccgacgccgagttccaggagcggctcaaagaagatacgtcttttgggggcaacctcgggcgagcagtcttccaggccaaaaagaggcttcttgaacctcttggtctggttgaggaagcggctaagacggctcctggaaagaagaggcctgtagagcagtctcctcaggaaccggactcctccgcgggtattggcaaatcgggtgcacagcccgctaaaaagagactcaatttcggtcagactggcgacacagagtcagtcccagaccctcaaccaatcggagaacctcccgcagccccctcaggtgtgggatctcttacaatggcttcaggtggtggcgcaccagtggcagacaataacgaaggtgccgatggagtgggtagttcctcgggaaattggcattgcgattcccaatggctgggggacagagtcatcaccaccagcacccgaacctgggccctgcccacctacaacaatcacctctacaagcaaatctccaacagcacatctggaggatcttcaaatgacaacgcctacttcggctacagcaccccctgggggtattttgacttcaacagattccactgccacttctcaccacgtgactggcagcgactcatcaacaacaactggggattccggcctaagcgactcaacttcaagctcttcaacattcaggtcaaagaggttacggacaacaatggagtcaagaccatcgccaataaccttaccagcacggtccaggtcttcacggactcagactatcagctcccgtacgtgctcgggtcggctcacgagggctgcctcccgccgttcccagcggacgttttcatgattcctcagtacgggtatctgacgcttaatgatggaagccaggccgtgggtcgttcgtccttttactgcctggaatatttcccgtcgcaaatgctaagaacgggtaacaacttccagttcagctacgagtttgagaacgtacctttccatagcagctacgctcacagccaaagcctggaccgactaatgaatccactcatcgaccaatacttgtactatctctcaaagactattaacggttctggacagaatcaacaaacgctaaaattcagtgtggccggacccagcaacatggctgtccagggaagaaactacatacctggacccagctaccgacaacaacgtgtctcaaccactgtgactcaaaacaacaacagcgaatttgcttggcctggagcttcttcttgggctctcaatggacgtaatagcttgatgaatcctggacctgctatggccagccacaaagaaggagaggaccgtttctttcctttgtctggatctttaatttttggcaaacaaggaactggaagagacaacgtggatgcggacaaagtcatgataaccaacgaagaagaaattaaaactactaacccggtagcaacggagtcctatggacaagtggccacaaaccaccagagtgcccaagcacaggcgcagaccggctgggttcaaaaccaaggaatacttccgggtatggtttggcaggacagagatgtgtacctgcaaggacccatttgggccaaaattcctcacacggacggcaactttcacccttctccgctgatgggagggtttggaatgaagcacccgcctcctcagatcctcatcaaaaacacacctgtacctgcggatcctccaacggccttcaacaaggacaagctgaactctttcatcacccagtattctactggccaagtcagcgtggagatcgagtgggagctgcagaaggaaaacagcaagcgcagaaacccggagatccagtacacttccaactattacaagtctaataatgttgaatttgctgttaatactgaaggtgtatatagtgaaccccgccccattggcaccagatacctgactcgtaatctgtaa

SEQ ID NO: 350 - protein, 736 aa, synthetic construct
MAADGYLPDWLEDNLSEGIREWWALKPGAPQPKANQQHQDNARGLVLPGYKYLGPGNGLDKGEPVNAADAAALEHDKAYDQQLKAGDNPYLKYNHADAEFQERLKEDTSFGGNLGRAVFQAKKRLLEPLGLVEEAAKTAPGKKRPVEQSPQEPDSSAGIGKSGAQPAKKRLNFGQTGDTESVPDPQPIGEPPAAPSGVGSLTMASGGGAPVADNNEGADGVGSSSGNWHCDSQWLGDRVITTSTRTWALPTYNNHLYKQISNSTSGGSSNDNAYFGYSTPWGYFDFNRFHCHFSPRDWQRLINNNWGFRPKRLNFKLFNIQVKEVTDNNGVKTIANNLTSTVQVFTDSDYQLPYVLGSAHEGCLPPFPADVFMIPQYGYLTLNDGSQAVGRSSFYCLEYFPSQMLRTGNNFQFSYEFENVPFHSSYAHSQSLDRLMNPLIDQYLYYLSKTINGSGQNQQTLKFSVAGPSNMAVQGRNYIPGPSYRQQRVSTTVTQNNNSEFAWPGASSWALNGRNSLMNPGPAMASHKEGEDRFFPLSGSLIFGKQGTGRDNVDADKVMITNEEEIKTTNPVATESYGQVATNHQSAQAQAQTGWVQNQGILPGMVWQDRDVYLQGPIWAKIPHTDGNFHPSPLMGGFGMKHPPPQILIKNTPVPADPPTAFNKDKLNSFITQYSTGQVSVEIEWELQKENSKRRNPEIQYTSNYYKSNNVEFAVNTEGVYSEPRPIGTRYLTRNL

SEQ ID NO: 351 - DNA, 1800 bp, synthetic construct
  source 1..1800: mol_type = other DNA
acggctcctggaaagaagaggcctgtagagcagtctcctcaggaaccggactcctccgcgggtattggcaaatcgggtgcacagcccgctaaaaagagactcaatttcggtcagactggcgacacagagtcagtcccagaccctcaaccaatcggagaacctcccgcagccccctcaggtgtgggatctcttacaatggcttcaggtggtggcgcaccagtggcagacaataacgaaggtgccgatggagtgggtagttcctcgggaaattggcattgcgattcccaatggctgggggacagagtcatcaccaccagcacccgaacctgggccctgcccacctacaacaatcacctctacaagcaaatctccaacagcacatctggaggatcttcaaatgacaacgcctacttcggctacagcaccccctgggggtattttgacttcaacagattccactgccacttctcaccacgtgactggcagcgactcatcaacaacaactggggattccggcctaagcgactcaacttcaagctcttcaacattcaggtcaaagaggttacggacaacaatggagtcaagaccatcgccaataaccttaccagcacggtccaggtcttcacggactcagactatcagctcccgtacgtgctcgggtcggctcacgagggctgcctcccgccgttcccagcggacgttttcatgattcctcagtacgggtatctgacgcttaatgatggaagccaggccgtgggtcgttcgtccttttactgcctggaatatttcccgtcgcaaatgctaagaacgggtaacaacttccagttcagctacgagtttgagaacgtacctttccatagcagctacgctcacagccaaagcctggaccgactaatgaatccactcatcgaccaatacttgtactatctctcaaagactattaacggttctggacagaatcaacaaacgctaaaattcagtgtggccggacccagcaacatggctgtccagggaagaaactacatacctggacccagctaccgacaacaacgtgtctcaaccactgtgactcaaaacaacaacagcgaatttgcttggcctggagcttcttcttgggctctcaatggacgtaatagcttgatgaatcctggacctgctatggccagccacaaagaaggagaggaccgtttctttcctttgtctggatctttaatttttggcaaacaaggaactggaagagacaacgtggatgcggacaaagtcatgataaccaacgaagaagaaattaaaactactaacccggtagcaacggagtcctatggacaagtggccacaaaccaccagagtgcccaagcacaggcgcagaccggctgggttcaaaaccaaggaatacttccgggtatggtttggcaggacagagatgtgtacctgcaaggacccatttgggccaaaattcctcacacggacggcaactttcacccttctccgctgatgggagggtttggaatgaagcacccgcctcctcagatcctcatcaaaaacacacctgtacctgcggatcctccaacggccttcaacaaggacaagctgaactctttcatcacccagtattctactggccaagtcagcgtggagatcgagtgggagctgcagaaggaaaacagcaagcgcagaaacccggagatccagtacacttccaactattacaagtctaataatgttgaatttgctgttaatactgaaggtgtatatagtgaaccccgccccattggcaccagatacctgactcgtaatctgtaa

SEQ ID NO: 352 - protein, 599 aa, synthetic construct
TAPGKKRPVEQSPQEPDSSAGIGKSGAQPAKKRLNFGQTGDTESVPDPQPIGEPPAAPSGVGSLTMASGGGAPVADNNEGADGVGSSSGNWHCDSQWLGDRVITTSTRTWALPTYNNHLYKQISNSTSGGSSNDNAYFGYSTPWGYFDFNRFHCHFSPRDWQRLINNNWGFRPKRLNFKLFNIQVKEVTDNNGVKTIANNLTSTVQVFTDSDYQLPYVLGSAHEGCLPPFPADVFMIPQYGYLTLNDGSQAVGRSSFYCLEYFPSQMLRTGNNFQFSYEFENVPFHSSYAHSQSLDRLMNPLIDQYLYYLSKTINGSGQNQQTLKFSVAGPSNMAVQGRNYIPGPSYRQQRVSTTVTQNNNSEFAWPGASSWALNGRNSLMNPGPAMASHKEGEDRFFPLSGSLIFGKQGTGRDNVDADKVMITNEEEIKTTNPVATESYGQVATNHQSAQAQAQTGWVQNQGILPGMVWQDRDVYLQGPIWAKIPHTDGNFHPSPLMGGFGMKHPPPQILIKNTPVPADPPTAFNKDKLNSFITQYSTGQVSVEIEWELQKENSKRRNPEIQYTSNYYKSNNVEFAVNTEGVYSEPRPIGTRYLTRNL

SEQ ID NO: 353 - DNA, 1605 bp, synthetic construct
  source 1..1605: mol_type = other DNA
atggcttcaggtggtggcgcaccagtggcagacaataacgaaggtgccgatggagtgggtagttcctcgggaaattggcattgcgattcccaatggctgggggacagagtcatcaccaccagcacccgaacctgggccctgcccacctacaacaatcacctctacaagcaaatctccaacagcacatctggaggatcttcaaatgacaacgcctacttcggctacagcaccccctgggggtattttgacttcaacagattccactgccacttctcaccacgtgactggcagcgactcatcaacaacaactggggattccggcctaagcgactcaacttcaagctcttcaacattcaggtcaaagaggttacggacaacaatggagtcaagaccatcgccaataaccttaccagcacggtccaggtcttcacggactcagactatcagctcccgtacgtgctcgggtcggctcacgagggctgcctcccgccgttcccagcggacgttttcatgattcctcagtacgggtatctgacgcttaatgatggaagccaggccgtgggtcgttcgtccttttactgcctggaatatttcccgtcgcaaatgctaagaacgggtaacaacttccagttcagctacgagtttgagaacgtacctttccatagcagctacgctcacagccaaagcctggaccgactaatgaatccactcatcgaccaatacttgtactatctctcaaagactattaacggttctggacagaatcaacaaacgctaaaattcagtgtggccggacccagcaacatggctgtccagggaagaaactacatacctggacccagctaccgacaacaacgtgtctcaaccactgtgactcaaaacaacaacagcgaatttgcttggcctggagcttcttcttgggctctcaatggacgtaatagcttgatgaatcctggacctgctatggccagccacaaagaaggagaggaccgtttctttcctttgtctggatctttaatttttggcaaacaaggaactggaagagacaacgtggatgcggacaaagtcatgataaccaacgaagaagaaattaaaactactaacccggtagcaacggagtcctatggacaagtggccacaaaccaccagagtgcccaagcacaggcgcagaccggctgggttcaaaaccaaggaatacttccgggtatggtttggcaggacagagatgtgtacctgcaaggacccatttgggccaaaattcctcacacggacggcaactttcacccttctccgctgatgggagggtttggaatgaagcacccgcctcctcagatcctcatcaaaaacacacctgtacctgcggatcctccaacggccttcaacaaggacaagctgaactctttcatcacccagtattctactggccaagtcagcgtggagatcgagtgggagctgcagaaggaaaacagcaagcgcagaaacccggagatccagtacacttccaactattacaagtctaataatgttgaatttgctgttaatactgaaggtgtatatagtgaaccccgccccattggcaccagatacctgactcgtaatctgtaa

SEQ ID NO: 354 - protein, 534 aa, synthetic construct
MASGGGAPVADNNEGADGVGSSSGNWHCDSQWLGDRVITTSTRTWALPTYNNHLYKQISNSTSGGSSNDNAYFGYSTPWGYFDFNRFHCHFSPRDWQRLINNNWGFRPKRLNFKLFNIQVKEVTDNNGVKTIANNLTSTVQVFTDSDYQLPYVLGSAHEGCLPPFPADVFMIPQYGYLTLNDGSQAVGRSSFYCLEYFPSQMLRTGNNFQFSYEFENVPFHSSYAHSQSLDRLMNPLIDQYLYYLSKTINGSGQNQQTLKFSVAGPSNMAVQGRNYIPGPSYRQQRVSTTVTQNNNSEFAWPGASSWALNGRNSLMNPGPAMASHKEGEDRFFPLSGSLIFGKQGTGRDNVDADKVMITNEEEIKTTNPVATESYGQVATNHQSAQAQAQTGWVQNQGILPGMVWQDRDVYLQGPIWAKIPHTDGNFHPSPLMGGFGMKHPPPQILIKNTPVPADPPTAFNKDKLNSFITQYSTGQVSVEIEWELQKENSKRRNPEIQYTSNYYKSNNVEFAVNTEGVYSEPRPIGTRYLTRNL

SEQ ID NO: 355 - DNA, 2211 bp, synthetic construct
  source 1..2211: mol_type = other DNA
atggctgccgatggttatcttccagattggctcgaggacaaccttagtgaaggaattcgcgagtggtgggctttgaaacctggagcccctcaacccaaggcaaatcaacaacatcaagacaacgctcgaggtcttgtgcttccgggttacaaataccttggacccggcaacggactcgacaagggggagccggtcaacgcagcagacgcggcggccctcgagcacgacaaggcctacgaccagcagctcaaggccggagacaacccgtacctcaagtacaaccacgccgacgccgagttccaggagcggctcaaagaagatacgtcttttgggggcaacctcgggcgagcagtcttccaggccaaaaagaggcttcttgaacctcttggtctggttgaggaagcggctaagacggctcctggaaagaagaggcctgtagagcagtctcctcaggaaccggactcctccgcgggtattggcaaatcgggtgcacagcccgctaaaaagagactcaatttcggtcagactggcgacacagagtcagtcccagaccctcaaccaatcggagaacctcccgcagccccctcaggtgtgggatctcttacaatggcttcaggtggtggcgcaccagtggcagacaataacgaaggtgccgatggagtgggtagttcctcgggaaattggcattgcgattcccaatggctgggggacagagtcatcaccaccagcacccgaacctgggccctgcccacctacaacaatcacctctacaagcaaatctccaacagcacatctggaggatcttcaaatgacaacgcctacttcggctacagcaccccctgggggtattttgacttcaacagattccactgccacttctcaccacgtgactggcagcgactcatcaacaacaactggggattccggcctaagcgactcaacttcaagctcttcaacattcaggtcaaagaggttacggacaacaatggagtcaagaccatcgccaataaccttaccagcacggtccaggtcttcacggactcagactatgctctcccgtacgtgctcgggtcggctcacgagggctgcctcccgccgttcccagcggacgttttcatgattcctcagtacgggtatctgacgcttaatgatggaagccaggccgtgggtcgttcgtccttttactgcctggaatatttcccgtcgcaaatgctaagaacgggtaacaacttccagttcagctacgagtttgagaacgtacctttccatagcagctacgctcacagccaaagcctggaccgactaatgaatccactcatcgaccaatacttgtactatctctcaaagactattaacggttctggacagaatcaacaaacgctaaaattcagtgtggccggacccagcaacatggctgtccagggaagaaactacatacctggacccagctaccgacaacaacgtgtctcaaccactgtgactcaaaacaacaacagcgaatttgcttggcctggagcttcttcttgggctctcaatggacgtaatagcttgatgaatcctggacctgctatggccagccacaaagaaggagaggaccgtttctttcctttgtctggatctttaatttttggcaaacaaggaactggaagagacaacgtggatgcggacaaagtcatgataaccaacgaagaagaaattaaaactactaacccggtagcaacggagtcctatggacaagtggccacaaaccaccagagtgcccaagcacaggcgcagaccggctgggttcaaaaccaaggaatacttccgggtatggtttggcaggacagagatgtgtacctgcaaggacccatttgggccaaaattcctcacacggacggcaactttcacccttctccgctgatgggagggtttggaatgaagcacccgcctcctcagatcctcatcaaaaacacacctgtacctgcggatcctccaacggccttcaacaaggacaagctgaactctttcatcacccagtattctactggccaagtcagcgtggagatcgagtgggagctgcagaaggaaaacagcaagcgctggaacccggagatccagtacacttccaactattacaagtctaataatgttgaatttgctgttaatactgaaggtgtatatagtgaaccccgccccattggcaccagatacctgactcgtaatctgtaa

SEQ ID NO: 356 - protein, 736 aa, synthetic construct
MAADGYLPDWLEDNLSEGIREWWALKPGAPQPKANQQHQDNARGLVLPGYKYLGPGNGLDKGEPVNAADAAALEHDKAYDQQLKAGDNPYLKYNHADAEFQERLKEDTSFGGNLGRAVFQAKKRLLEPLGLVEEAAKTAPGKKRPVEQSPQEPDSSAGIGKSGAQPAKKRLNFGQTGDTESVPDPQPIGEPPAAPSGVGSLTMASGGGAPVADNNEGADGVGSSSGNWHCDSQWLGDRVITTSTRTWALPTYNNHLYKQISNSTSGGSSNDNAYFGYSTPWGYFDFNRFHCHFSPRDWQRLINNNWGFRPKRLNFKLFNIQVKEVTDNNGVKTIANNLTSTVQVFTDSDYALPYVLGSAHEGCLPPFPADVFMIPQYGYLTLNDGSQAVGRSSFYCLEYFPSQMLRTGNNFQFSYEFENVPFHSSYAHSQSLDRLMNPLIDQYLYYLSKTINGSGQNQQTLKFSVAGPSNMAVQGRNYIPGPSYRQQRVSTTVTQNNNSEFAWPGASSWALNGRNSLMNPGPAMASHKEGEDRFFPLSGSLIFGKQGTGRDNVDADKVMITNEEEIKTTNPVATESYGQVATNHQSAQAQAQTGWVQNQGILPGMVWQDRDVYLQGPIWAKIPHTDGNFHPSPLMGGFGMKHPPPQILIKNTPVPADPPTAFNKDKLNSFITQYSTGQVSVEIEWELQKENSKRWNPEIQYTSNYYKSNNVEFAVNTEGVYSEPRPIGTRYLTRNL

SEQ ID NO: 357 - DNA, 1800 bp, synthetic construct
  source 1..1800: mol_type = other DNA
acggctcctggaaagaagaggcctgtagagcagtctcctcaggaaccggactcctccgcgggtattggcaaatcgggtgcacagcccgctaaaaagagactcaatttcggtcagactggcgacacagagtcagtcccagaccctcaaccaatcggagaacctcccgcagccccctcaggtgtgggatctcttacaatggcttcaggtggtggcgcaccagtggcagacaataacgaaggtgccgatggagtgggtagttcctcgggaaattggcattgcgattcccaatggctgggggacagagtcatcaccaccagcacccgaacctgggccctgcccacctacaacaatcacctctacaagcaaatctccaacagcacatctggaggatcttcaaatgacaacgcctacttcggctacagcaccccctgggggtattttgacttcaacagattccactgccacttctcaccacgtgactggcagcgactcatcaacaacaactggggattccggcctaagcgactcaacttcaagctcttcaacattcaggtcaaagaggttacggacaacaatggagtcaagaccatcgccaataaccttaccagcacggtccaggtcttcacggactcagactatgctctcccgtacgtgctcgggtcggctcacgagggctgcctcccgccgttcccagcggacgttttcatgattcctcagtacgggtatctgacgcttaatgatggaagccaggccgtgggtcgttcgtccttttactgcctggaatatttcccgtcgcaaatgctaagaacgggtaacaacttccagttcagctacgagtttgagaacgtacctttccatagcagctacgctcacagccaaagcctggaccgactaatgaatccactcatcgaccaatacttgtactatctctcaaagactattaacggttctggacagaatcaacaaacgctaaaattcagtgtggccggacccagcaacatggctgtccagggaagaaactacatacctggacccagctaccgacaacaacgtgtctcaaccactgtgactcaaaacaacaacagcgaatttgcttggcctggagcttcttcttgggctctcaatggacgtaatagcttgatgaatcctggacctgctatggccagccacaaagaaggagaggaccgtttctttcctttgtctggatctttaatttttggcaaacaaggaactggaagagacaacgtggatgcggacaaagtcatgataaccaacgaagaagaaattaaaactactaacccggtagcaacggagtcctatggacaagtggccacaaaccaccagagtgcccaagcacaggcgcagaccggctgggttcaaaaccaaggaatacttccgggtatggtttggcaggacagagatgtgtacctgcaaggacccatttgggccaaaattcctcacacggacggcaactttcacccttctccgctgatgggagggtttggaatgaagcacccgcctcctcagatcctcatcaaaaacacacctgtacctgcggatcctccaacggccttcaacaaggacaagctgaactctttcatcacccagtattctactggccaagtcagcgtggagatcgagtgggagctgcagaaggaaaacagcaagcgctggaacccggagatccagtacacttccaactattacaagtctaataatgttgaatttgctgttaatactgaaggtgtatatagtgaaccccgccccattggcaccagatacctgactcgtaatctgtaa

SEQ ID NO: 358 - protein, 599 aa, synthetic construct
TAPGKKRPVEQSPQEPDSSAGIGKSGAQPAKKRLNFGQTGDTESVPDPQPIGEPPAAPSGVGSLTMASGGGAPVADNNEGADGVGSSSGNWHCDSQWLGDRVITTSTRTWALPTYNNHLYKQISNSTSGGSSNDNAYFGYSTPWGYFDFNRFHCHFSPRDWQRLINNNWGFRPKRLNFKLFNIQVKEVTDNNGVKTIANNLTSTVQVFTDSDYALPYVLGSAHEGCLPPFPADVFMIPQYGYLTLNDGSQAVGRSSFYCLEYFPSQMLRTGNNFQFSYEFENVPFHSSYAHSQSLDRLMNPLIDQYLYYLSKTINGSGQNQQTLKFSVAGPSNMAVQGRNYIPGPSYRQQRVSTTVTQNNNSEFAWPGASSWALNGRNSLMNPGPAMASHKEGEDRFFPLSGSLIFGKQGTGRDNVDADKVMITNEEEIKTTNPVATESYGQVATNHQSAQAQAQTGWVQNQGILPGMVWQDRDVYLQGPIWAKIPHTDGNFHPSPLMGGFGMKHPPPQILIKNTPVPADPPTAFNKDKLNSFITQYSTGQVSVEIEWELQKENSKRWNPEIQYTSNYYKSNNVEFAVNTEGVYSEPRPIGTRYLTRNL

SEQ ID NO: 359 - DNA, 1605 bp, synthetic construct
  source 1..1605: mol_type = other DNA
atggcttcaggtggtggcgcaccagtggcagacaataacgaaggtgccgatggagtgggtagttcctcgggaaattggcattgcgattcccaatggctgggggacagagtcatcaccaccagcacccgaacctgggccctgcccacctacaacaatcacctctacaagcaaatctccaacagcacatctggaggatcttcaaatgacaacgcctacttcggctacagcaccccctgggggtattttgacttcaacagattccactgccacttctcaccacgtgactggcagcgactcatcaacaacaactggggattccggcctaagcgactcaacttcaagctcttcaacattcaggtcaaagaggttacggacaacaatggagtcaagaccatcgccaataaccttaccagcacggtccaggtcttcacggactcagactatgctctcccgtacgtgctcgggtcggctcacgagggctgcctcccgccgttcccagcggacgttttcatgattcctcagtacgggtatctgacgcttaatgatggaagccaggccgtgggtcgttcgtccttttactgcctggaatatttcccgtcgcaaatgctaagaacgggtaacaacttccagttcagctacgagtttgagaacgtacctttccatagcagctacgctcacagccaaagcctggaccgactaatgaatccactcatcgaccaatacttgtactatctctcaaagactattaacggttctggacagaatcaacaaacgctaaaattcagtgtggccggacccagcaacatggctgtccagggaagaaactacatacctggacccagctaccgacaacaacgtgtctcaaccactgtgactcaaaacaacaacagcgaatttgcttggcctggagcttcttcttgggctctcaatggacgtaatagcttgatgaatcctggacctgctatggccagccacaaagaaggagaggaccgtttctttcctttgtctggatctttaatttttggcaaacaaggaactggaagagacaacgtggatgcggacaaagtcatgataaccaacgaagaagaaattaaaactactaacccggtagcaacggagtcctatggacaagtggccacaaaccaccagagtgcccaagcacaggcgcagaccggctgggttcaaaaccaaggaatacttccgggtatggtttggcaggacagagatgtgtacctgcaaggacccatttgggccaaaattcctcacacggacggcaactttcacccttctccgctgatgggagggtttggaatgaagcacccgcctcctcagatcctcatcaaaaacacacctgtacctgcggatcctccaacggccttcaacaaggacaagctgaactctttcatcacccagtattctactggccaagtcagcgtggagatcgagtgggagctgcagaaggaaaacagcaagcgctggaacccggagatccagtacacttccaactattacaagtctaataatgttgaatttgctgttaatactgaaggtgtatatagtgaaccccgccccattggcaccagatacctgactcgtaatctgtaa

SEQ ID NO: 360 - protein, 534 aa, synthetic construct
MASGGGAPVADNNEGADGVGSSSGNWHCDSQWLGDRVITTSTRTWALPTYNNHLYKQISNSTSGGSSNDNAYFGYSTPWGYFDFNRFHCHFSPRDWQRLINNNWGFRPKRLNFKLFNIQVKEVTDNNGVKTIANNLTSTVQVFTDSDYALPYVLGSAHEGCLPPFPADVFMIPQYGYLTLNDGSQAVGRSSFYCLEYFPSQMLRTGNNFQFSYEFENVPFHSSYAHSQSLDRLMNPLIDQYLYYLSKTINGSGQNQQTLKFSVAGPSNMAVQGRNYIPGPSYRQQRVSTTVTQNNNSEFAWPGASSWALNGRNSLMNPGPAMASHKEGEDRFFPLSGSLIFGKQGTGRDNVDADKVMITNEEEIKTTNPVATESYGQVATNHQSAQAQAQTGWVQNQGILPGMVWQDRDVYLQGPIWAKIPHTDGNFHPSPLMGGFGMKHPPPQILIKNTPVPADPPTAFNKDKLNSFITQYSTGQVSVEIEWELQKENSKRWNPEIQYTSNYYKSNNVEFAVNTEGVYSEPRPIGTRYLTRNL

SEQ ID NO: 361 - DNA, 2211 bp, synthetic construct
  source 1..2211: mol_type = other DNA
atggctgccgatggttatcttccagattggctcgaggacaaccttagtgaaggaattcgcgagtggtgggctttgaaacctggagcccctcaacccaaggcaaatcaacaacatcaagacaacgctcgaggtcttgtgcttccgggttacaaataccttggacccggcaacggactcgacaagggggagccggtcaacgcagcagacgcggcggccctcgagcacgacaaggcctacgaccagcagctcaaggccggagacaacccgtacctcaagtacaaccacgccgacgccgagttccaggagcggctcaaagaagatacgtcttttgggggcaacctcgggcgagcagtcttccaggccaaaaagaggcttcttgaacctcttggtctggttgaggaagcggctaagacggctcctggaaagaagaggcctgtagagcagtctcctcaggaaccggactcctccgcgggtattggcaaatcgggtgcacagcccgctaaaaagagactcaatttcggtcagactggcgacacagagtcagtcccagaccctcaaccaatcggagaacctcccgcagccccctcaggtgtgggatctcttacaatggcttcaggtggtggcgcaccagtggcagacaataacgaaggtgccgatggagtgggtagttcctcgggaaattggcattgcgattcccaatggctgggggacagagtcatcaccaccagcacccgaacctgggccctgcccacctacaacaatcacctctacaagcaaatctccaacagcacatctggaggatcttcaaatgacaacgcctacttcggctacagcaccccctgggggtattttgacttcaacagattccactgccacttctcaccacgtgactggcagcgactcatcaacaacaactggggattccggcctaagcgactcaacttcaagctcttcaacattcaggtcaaagaggttacggacaacaatggagtcaagaccatcgccaataaccttaccagcacggtccaggtcttcacggactcagactatcagctcccgtacgtgctcgggtcggctcacgagggctgcctcccgccgttcccagcggacgttttcatgattcctcagtacgggtatctgacgcttaatgatggaagccaggccgtgggtcgttcgtcctttttctgcctggaatatttcccgtcgcaaatgctaagaacgggtaacaacttccagttcagctacgagtttgagaacgtacctttccatagcagctacgctcacagccaaagcctggaccgactaatgaatccactcatcgaccaatacttgtactatctctcaaagactattaacggttctggacagaatcaacaaacgctaaaattcagtgtggccggacccagcaacatggctgtccagggaagaaactacatacctggacccagctaccgacaacaacgtgtctcaaccactgtgactcaaaacaacaacagcgaatttgcttggcctggagcttcttcttgggctctcaatggacgtaatagcttgatgaatcctggacctgctatggccagccacaaagaaggagaggaccgtttctttcctttgtctggatctttaatttttggcaaacaaggaactggaagagacaacgtggatgcggacaaagtcatgataaccaacgaagaagaaattaaaactactaacccggtagcaacggagtcctatggacaagtggccacaaaccaccagagtgcccaagcacaggcgcagaccggctgggttcaaaaccaaggaatacttccgggtatggtttggcaggacagagatgtgtacctgcaaggacccatttgggccaaaattcctcacacggacggcaactttcacccttctccgctgatgggagggtttggaatgaagcacccgcctcctcagatcctcatcaaaaacacacctgtacctgcggatcctccaacggccttcaacaaggacaagctgaactctttcatcacccagtattctactggccaagtcagcgtggagatcgagtgggagctgcagaaggaaaacagcaagcgctggaacccggagatccagtacacttccaactattacaagtctaataatgttgaatttgctgttaatactgaaggtgtatatagtgaaccccgccccattggcaccagatacctgactcgtaatctgtaa

SEQ ID NO: 362 - protein, 736 aa, synthetic construct
MAADGYLPDWLEDNLSEGIREWWALKPGAPQPKANQQHQDNARGLVLPGYKYLGPGNGLDKGEPVNAADAAALEHDKAYDQQLKAGDNPYLKYNHADAEFQERLKEDTSFGGNLGRAVFQAKKRLLEPLGLVEEAAKTAPGKKRPVEQSPQEPDSSAGIGKSGAQPAKKRLNFGQTGDTESVPDPQPIGEPPAAPSGVGSLTMASGGGAPVADNNEGADGVGSSSGNWHCDSQWLGDRVITTSTRTWALPTYNNHLYKQISNSTSGGSSNDNAYFGYSTPWGYFDFNRFHCHFSPRDWQRLINNNWGFRPKRLNFKLFNIQVKEVTDNNGVKTIANNLTSTVQVFTDSDYQLPYVLGSAHEGCLPPFPADVFMIPQYGYLTLNDGSQAVGRSSFFCLEYFPSQMLRTGNNFQFSYEFENVPFHSSYAHSQSLDRLMNPLIDQYLYYLSKTINGSGQNQQTLKFSVAGPSNMAVQGRNYIPGPSYRQQRVSTTVTQNNNSEFAWPGASSWALNGRNSLMNPGPAMASHKEGEDRFFPLSGSLIFGKQGTGRDNVDADKVMITNEEEIKTTNPVATESYGQVATNHQSAQAQAQTGWVQNQGILPGMVWQDRDVYLQGPIWAKIPHTDGNFHPSPLMGGFGMKHPPPQILIKNTPVPADPPTAFNKDKLNSFITQYSTGQVSVEIEWELQKENSKRWNPEIQYTSNYYKSNNVEFAVNTEGVYSEPRPIGTRYLTRNL

SEQ ID NO: 363 - DNA, 1800 bp, synthetic construct
  source 1..1800: mol_type = other DNA
acggctcctggaaagaagaggcctgtagagcagtctcctcaggaaccggactcctccgcgggtattggcaaatcgggtgcacagcccgctaaaaagagactcaatttcggtcagactggcgacacagagtcagtcccagaccctcaaccaatcggagaacctcccgcagccccctcaggtgtgggatctcttacaatggcttcaggtggtggcgcaccagtggcagacaataacgaaggtgccgatggagtgggtagttcctcgggaaattggcattgcgattcccaatggctgggggacagagtcatcaccaccagcacccgaacctgggccctgcccacctacaacaatcacctctacaagcaaatctccaacagcacatctggaggatcttcaaatgacaacgcctacttcggctacagcaccccctgggggtattttgacttcaacagattccactgccacttctcaccacgtgactggcagcgactcatcaacaacaactggggattccggcctaagcgactcaacttcaagctcttcaacattcaggtcaaagaggttacggacaacaatggagtcaagaccatcgccaataaccttaccagcacggtccaggtcttcacggactcagactatcagctcccgtacgtgctcgggtcggctcacgagggctgcctcccgccgttcccagcggacgttttcatgattcctcagtacgggtatctgacgcttaatgatggaagccaggccgtgggtcgttcgtcctttttctgcctggaatatttcccgtcgcaaatgctaagaacgggtaacaacttccagttcagctacgagtttgagaacgtacctttccatagcagctacgctcacagccaaagcctggaccgactaatgaatccactcatcgaccaatacttgtactatctctcaaagactattaacggttctggacagaatcaacaaacgctaaaattcagtgtggccggacccagcaacatggctgtccagggaagaaactacatacctggacccagctaccgacaacaacgtgtctcaaccactgtgactcaaaacaacaacagcgaatttgcttggcctggagcttcttcttgggctctcaatggacgtaatagcttgatgaatcctggacctgctatggccagccacaaagaaggagaggaccgtttctttcctttgtctggatctttaatttttggcaaacaaggaactggaagagacaacgtggatgcggacaaagtcatgataaccaacgaagaagaaattaaaactactaacccggtagcaacggagtcctatggacaagtggccacaaaccaccagagtgcccaagcacaggcgcagaccggctgggttcaaaaccaaggaatacttccgggtatggtttggcaggacagagatgtgtacctgcaaggacccatttgggccaaaattcctcacacggacggcaactttcacccttctccgctgatgggagggtttggaatgaagcacccgcctcctcagatcctcatcaaaaacacacctgtacctgcggatcctccaacggccttcaacaaggacaagctgaactctttcatcacccagtattctactggccaagtcagcgtggagatcgagtgggagctgcagaaggaaaacagcaagcgctggaacccggagatccagtacacttccaactattacaagtctaataatgttgaatttgctgttaatactgaaggtgtatatagtgaaccccgccccattggcaccagatacctgactcgtaatctgtaa

SEQ ID NO: 364 - protein, 599 aa, synthetic construct
TAPGKKRPVEQSPQEPDSSAGIGKSGAQPAKKRLNFGQTGDTESVPDPQPIGEPPAAPSGVGSLTMASGGGAPVADNNEGADGVGSSSGNWHCDSQWLGDRVITTSTRTWALPTYNNHLYKQISNSTSGGSSNDNAYFGYSTPWGYFDFNRFHCHFSPRDWQRLINNNWGFRPKRLNFKLFNIQVKEVTDNNGVKTIANNLTSTVQVFTDSDYQLPYVLGSAHEGCLPPFPADVFMIPQYGYLTLNDGSQAVGRSSFFCLEYFPSQMLRTGNNFQFSYEFENVPFHSSYAHSQSLDRLMNPLIDQYLYYLSKTINGSGQNQQTLKFSVAGPSNMAVQGRNYIPGPSYRQQRVSTTVTQNNNSEFAWPGASSWALNGRNSLMNPGPAMASHKEGEDRFFPLSGSLIFGKQGTGRDNVDADKVMITNEEEIKTTNPVATESYGQVATNHQSAQAQAQTGWVQNQGILPGMVWQDRDVYLQGPIWAKIPHTDGNFHPSPLMGGFGMKHPPPQILIKNTPVPADPPTAFNKDKLNSFITQYSTGQVSVEIEWELQKENSKRWNPEIQYTSNYYKSNNVEFAVNTEGVYSEPRPIGTRYLTRNL

SEQ ID NO: 365 - DNA, 1605 bp, synthetic construct
  source 1..1605: mol_type = other DNA
atggcttcaggtggtggcgcaccagtggcagacaataacgaaggtgccgatggagtgggtagttcctcgggaaattggcattgcgattcccaatggctgggggacagagtcatcaccaccagcacccgaacctgggccctgcccacctacaacaatcacctctacaagcaaatctccaacagcacatctggaggatcttcaaatgacaacgcctacttcggctacagcaccccctgggggtattttgacttcaacagattccactgccacttctcaccacgtgactggcagcgactcatcaacaacaactggggattccggcctaagcgactcaacttcaagctcttcaacattcaggtcaaagaggttacggacaacaatggagtcaagaccatcgccaataaccttaccagcacggtccaggtcttcacggactcagactatcagctcccgtacgtgctcgggtcggctcacgagggctgcctcccgccgttcccagcggacgttttcatgattcctcagtacgggtatctgacgcttaatgatggaagccaggccgtgggtcgttcgtcctttttctgcctggaatatttcccgtcgcaaatgctaagaacgggtaacaacttccagttcagctacgagtttgagaacgtacctttccatagcagctacgctcacagccaaagcctggaccgactaatgaatccactcatcgaccaatacttgtactatctctcaaagactattaacggttctggacagaatcaacaaacgctaaaattcagtgtggccggacccagcaacatggctgtccagggaagaaactacatacctggacccagctaccgacaacaacgtgtctcaaccactgtgactcaaaacaacaacagcgaatttgcttggcctggagcttcttcttgggctctcaatggacgtaatagcttgatgaatcctggacctgctatggccagccacaaagaaggagaggaccgtttctttcctttgtctggatctttaatttttggcaaacaaggaactggaagagacaacgtggatgcggacaaagtcatgataaccaacgaagaagaaattaaaactactaacccggtagcaacggagtcctatggacaagtggccacaaaccaccagagtgcccaagcacaggcgcagaccggctgggttcaaaaccaaggaatacttccgggtatggtttggcaggacagagatgtgtacctgcaaggacccatttgggccaaaattcctcacacggacggcaactttcacccttctccgctgatgggagggtttggaatgaagcacccgcctcctcagatcctcatcaaaaacacacctgtacctgcggatcctccaacggccttcaacaaggacaagctgaactctttcatcacccagtattctactggccaagtcagcgtggagatcgagtgggagctgcagaaggaaaacagcaagcgctggaacccggagatccagtacacttccaactattacaagtctaataatgttgaatttgctgttaatactgaaggtgtatatagtgaaccccgccccattggcaccagatacctgactcgtaatctgtaa

SEQ ID NO: 366 - protein, 534 aa, synthetic construct
MASGGGAPVADNNEGADGVGSSSGNWHCDSQWLGDRVITTSTRTWALPTYNNHLYKQISNSTSGGSSNDNAYFGYSTPWGYFDFNRFHCHFSPRDWQRLINNNWGFRPKRLNFKLFNIQVKEVTDNNGVKTIANNLTSTVQVFTDSDYQLPYVLGSAHEGCLPPFPADVFMIPQYGYLTLNDGSQAVGRSSFFCLEYFPSQMLRTGNNFQFSYEFENVPFHSSYAHSQSLDRLMNPLIDQYLYYLSKTINGSGQNQQTLKFSVAGPSNMAVQGRNYIPGPSYRQQRVSTTVTQNNNSEFAWPGASSWALNGRNSLMNPGPAMASHKEGEDRFFPLSGSLIFGKQGTGRDNVDADKVMITNEEEIKTTNPVATESYGQVATNHQSAQAQAQTGWVQNQGILPGMVWQDRDVYLQGPIWAKIPHTDGNFHPSPLMGGFGMKHPPPQILIKNTPVPADPPTAFNKDKLNSFITQYSTGQVSVEIEWELQKENSKRWNPEIQYTSNYYKSNNVEFAVNTEGVYSEPRPIGTRYLTRNL

SEQ ID NO: 367 - DNA, 2211 bp, synthetic construct
  source 1..2211: mol_type = other DNA
atggctgccgatggttatcttccagattggctcgaggacaaccttagtgaaggaattcgcgagtggtgggctttgaaacctggagcccctcaacccaaggcaaatcaacaacatcaagacaacgctcgaggtcttgtgcttccgggttacaaataccttggacccggcaacggactcgacaagggggagccggtcaacgcagcagacgcggcggccctcgagcacgacaaggcctacgaccagcagctcaaggccggagacaacccgtacctcaagtacaaccacgccgacgccgagttccaggagcggctcaaagaagatacgtcttttgggggcaacctcgggcgagcagtcttccaggccaaaaagaggcttcttgaacctcttggtctggttgaggaagcggctaagacggctcctggaaagaagaggcctgtagagcagtctcctcaggaaccggactcctccgcgggtattggcaaatcgggtgcacagcccgctaaaaagagactcaatttcggtcagactggcgacacagagtcagtcccagaccctcaaccaatcggagaacctcccgcagccccctcaggtgtgggatctcttacaatggcttcaggtggtggcgcaccagtggcagacaataacgaaggtgccgatggagtgggtagttcctcgggaaattggcattgcgattcccaatggctgggggacagagtcatcaccaccagcacccgaacctgggccctgcccacctacaacaatcacctctacaagcaaatctccaacagcacatctggaggatcttcaaatgacaacgcctacttcggctacagcaccccctgggggtattttgacttcaacagattccactgccacttctcaccacgtgactggcagcgactcatcaacaacaactggggattccggcctaagcgactcaacttcaagctcttcaacattcaggtcaaagaggttacggacaacaatggagtcaagaccatcgccaataaccttaccagcacggtccaggtcttcacggactcagactatcagctcccgtacgtgctcgggtcggctcacgagggctgcctcccgccgttcccagcggacgttttcatgattcctcagtacgggtatctgacgcttaatgatggaagccaggccgtgggtcgttcgtccttttactgcctggaatatttcccgtcgcaaatgctaagaacgggtaacaacttccagttcagctacgagtttgagaacgtacctttccatagcagctacgctcacagccaaagcctggacctgctaatgaatccactcatcgaccaatacttgtactatctctcaaagactattaacggttctggacagaatcaacaaacgctaaaattcagtgtggccggacccagcaacatggctgtccagggaagaaactacatacctggacccagctaccgacaacaacgtgtctcaaccactgtgactcaaaacaacaacagcgaatttgcttggcctggagcttcttcttgggctctcaatggacgtaatagcttgatgaatcctggacctgctatggccagccacaaagaaggagaggaccgtttctttcctttgtctggatctttaatttttggcaaacaaggaactggaagagacaacgtggatgcggacaaagtcatgataaccaacgaagaagaaattaaaactactaacccggtagcaacggagtcctatggacaagtggccacaaaccaccagagtgcccaagcacaggcgcagaccggctgggttcaaaaccaaggaatacttccgggtatggtttggcaggacagagatgtgtacctgcaaggacccatttgggccaaaattcctcacacggacggcaactttcacccttctccgctgatgggagggtttggaatgaagcacccgcctcctcagatcctcatcaaaaacacacctgtacctgcggatcctccaacggccttcaacaaggacaagctgaactctttcatcacccagtattctactggccaagtcagcgtggagatcgagtgggagctgcagaaggaaaacagcaagcgctggaacccggagatccagtacacttccaactattacaagtctaataatgttgaatttgctgttaatactgaaggtgtatatagtgaaccccgccccattggcaccagatacctgactcgtaatctgtaa

SEQ ID NO: 368 - protein, 736 aa, synthetic construct
MAADGYLPDWLEDNLSEGIREWWALKPGAPQPKANQQHQDNARGLVLPGYKYLGPGNGLDKGEPVNAADAAALEHDKAYDQQLKAGDNPYLKYNHADAEFQERLKEDTSFGGNLGRAVFQAKKRLLEPLGLVEEAAKTAPGKKRPVEQSPQEPDSSAGIGKSGAQPAKKRLNFGQTGDTESVPDPQPIGEPPAAPSGVGSLTMASGGGAPVADNNEGADGVGSSSGNWHCDSQWLGDRVITTSTRTWALPTYNNHLYKQISNSTSGGSSNDNAYFGYSTPWGYFDFNRFHCHFSPRDWQRLINNNWGFRPKRLNFKLFNIQVKEVTDNNGVKTIANNLTSTVQVFTDSDYQLPYVLGSAHEGCLPPFPADVFMIPQYGYLTLNDGSQAVGRSSFYCLEYFPSQMLRTGNNFQFSYEFENVPFHSSYAHSQSLDLLMNPLIDQYLYYLSKTINGSGQNQQTLKFSVAGPSNMAVQGRNYIPGPSYRQQRVSTTVTQNNNSEFAWPGASSWALNGRNSLMNPGPAMASHKEGEDRFFPLSGSLIFGKQGTGRDNVDADKVMITNEEEIKTTNPVATESYGQVATNHQSAQAQAQTGWVQNQGILPGMVWQDRDVYLQGPIWAKIPHTDGNFHPSPLMGGFGMKHPPPQILIKNTPVPADPPTAFNKDKLNSFITQYSTGQVSVEIEWELQKENSKRWNPEIQYTSNYYKSNNVEFAVNTEGVYSEPRPIGTRYLTRNL

SEQ ID NO: 369 - DNA, 1800 bp, synthetic construct
  source 1..1800: mol_type = other DNA
acggctcctggaaagaagaggcctgtagagcagtctcctcaggaaccggactcctccgcgggtattggcaaatcgggtgcacagcccgctaaaaagagactcaatttcggtcagactggcgacacagagtcagtcccagaccctcaaccaatcggagaacctcccgcagccccctcaggtgtgggatctcttacaatggcttcaggtggtggcgcaccagtggcagacaataacgaaggtgccgatggagtgggtagttcctcgggaaattggcattgcgattcccaatggctgggggacagagtcatcaccaccagcacccgaacctgggccctgcccacctacaacaatcacctctacaagcaaatctccaacagcacatctggaggatcttcaaatgacaacgcctacttcggctacagcaccccctgggggtattttgacttcaacagattccactgccacttctcaccacgtgactggcagcgactcatcaacaacaactggggattccggcctaagcgactcaacttcaagctcttcaacattcaggtcaaagaggttacggacaacaatggagtcaagaccatcgccaataaccttaccagcacggtccaggtcttcacggactcagactatcagctcccgtacgtgctcgggtcggctcacgagggctgcctcccgccgttcccagcggacgttttcatgattcctcagtacgggtatctgacgcttaatgatggaagccaggccgtgggtcgttcgtccttttactgcctggaatatttcccgtcgcaaatgctaagaacgggtaacaacttccagttcagctacgagtttgagaacgtacctttccatagcagctacgctcacagccaaagcctggacctgctaatgaatccactcatcgaccaatacttgtactatctctcaaagactattaacggttctggacagaatcaacaaacgctaaaattcagtgtggccggacccagcaacatggctgtccagggaagaaactacatacctggacccagctaccgacaacaacgtgtctcaaccactgtgactcaaaacaacaacagcgaatttgcttggcctggagcttcttcttgggctctcaatggacgtaatagcttgatgaatcctggacctgctatggccagccacaaagaaggagaggaccgtttctttcctttgtctggatctttaatttttggcaaacaaggaactggaagagacaacgtggatgcggacaaagtcatgataaccaacgaagaagaaattaaaactactaacccggtagcaacggagtcctatggacaagtggccacaaaccaccagagtgcccaagcacaggcgcagaccggctgggttcaaaaccaaggaatacttccgggtatggtttggcaggacagagatgtgtacctgcaaggacccatttgggccaaaattcctcacacggacggcaactttcacccttctccgctgatgggagggtttggaatgaagcacccgcctcctcagatcctcatcaaaaacacacctgtacctgcggatcctccaacggccttcaacaaggacaagctgaactctttcatcacccagtattctactggccaagtcagcgtggagatcgagtgggagctgcagaaggaaaacagcaagcgctggaacccggagatccagtacacttccaactattacaagtctaataatgttgaatttgctgttaatactgaaggtgtatatagtgaaccccgccccattggcaccagatacctgactcgtaatctgtaa

SEQ ID NO: 370 - protein, 599 aa, synthetic construct
TAPGKKRPVEQSPQEPDSSAGIGKSGAQPAKKRLNFGQTGDTESVPDPQPIGEPPAAPSGVGSLTMASGGGAPVADNNEGADGVGSSSGNWHCDSQWLGDRVITTSTRTWALPTYNNHLYKQISNSTSGGSSNDNAYFGYSTPWGYFDFNRFHCHFSPRDWQRLINNNWGFRPKRLNFKLFNIQVKEVTDNNGVKTIANNLTSTVQVFTDSDYQLPYVLGSAHEGCLPPFPADVFMIPQYGYLTLNDGSQAVGRSSFYCLEYFPSQMLRTGNNFQFSYEFENVPFHSSYAHSQSLDLLMNPLIDQYLYYLSKTINGSGQNQQTLKFSVAGPSNMAVQGRNYIPGPSYRQQRVSTTVTQNNNSEFAWPGASSWALNGRNSLMNPGPAMASHKEGEDRFFPLSGSLIFGKQGTGRDNVDADKVMITNEEEIKTTNPVATESYGQVATNHQSAQAQAQTGWVQNQGILPGMVWQDRDVYLQGPIWAKIPHTDGNFHPSPLMGGFGMKHPPPQILIKNTPVPADPPTAFNKDKLNSFITQYSTGQVSVEIEWELQKENSKRWNPEIQYTSNYYKSNNVEFAVNTEGVYSEPRPIGTRYLTRNL

SEQ ID NO: 371 - DNA, 1605 bp, synthetic construct
  source 1..1605: mol_type = other DNA
atggcttcaggtggtggcgcaccagtggcagacaataacgaaggtgccgatggagtgggtagttcctcgggaaattggcattgcgattcccaatggctgggggacagagtcatcaccaccagcacccgaacctgggccctgcccacctacaacaatcacctctacaagcaaatctccaacagcacatctggaggatcttcaaatgacaacgcctacttcggctacagcaccccctgggggtattttgacttcaacagattccactgccacttctcaccacgtgactggcagcgactcatcaacaacaactggggattccggcctaagcgactcaacttcaagctcttcaacattcaggtcaaagaggttacggacaacaatggagtcaagaccatcgccaataaccttaccagcacggtccaggtcttcacggactcagactatcagctcccgtacgtgctcgggtcggctcacgagggctgcctcccgccgttcccagcggacgttttcatgattcctcagtacgggtatctgacgcttaatgatggaagccaggccgtgggtcgttcgtccttttactgcctggaatatttcccgtcgcaaatgctaagaacgggtaacaacttccagttcagctacgagtttgagaacgtacctttccatagcagctacgctcacagccaaagcctggacctgctaatgaatccactcatcgaccaatacttgtactatctctcaaagactattaacggttctggacagaatcaacaaacgctaaaattcagtgtggccggacccagcaacatggctgtccagggaagaaactacatacctggacccagctaccgacaacaacgtgtctcaaccactgtgactcaaaacaacaacagcgaatttgcttggcctggagcttcttcttgggctctcaatggacgtaatagcttgatgaatcctggacctgctatggccagccacaaagaaggagaggaccgtttctttcctttgtctggatctttaatttttggcaaacaaggaactggaagagacaacgtggatgcggacaaagtcatgataaccaacgaagaagaaattaaaactactaacccggtagcaacggagtcctatggacaagtggccacaaaccaccagagtgcccaagcacaggcgcagaccggctgggttcaaaaccaaggaatacttccgggtatggtttggcaggacagagatgtgtacctgcaaggacccatttgggccaaaattcctcacacggacggcaactttcacccttctccgctgatgggagggtttggaatgaagcacccgcctcctcagatcctcatcaaaaacacacctgtacctgcggatcctccaacggccttcaacaaggacaagctgaactctttcatcacccagtattctactggccaagtcagcgtggagatcgagtgggagctgcagaaggaaaacagcaagcgctggaacccggagatccagtacacttccaactattacaagtctaataatgttgaatttgctgttaatactgaaggtgtatatagtgaaccccgccccattggcaccagatacctgactcgtaatctgtaa

SEQ ID NO: 372 - protein, 534 aa, synthetic construct
MASGGGAPVADNNEGADGVGSSSGNWHCDSQWLGDRVITTSTRTWALPTYNNHLYKQISNSTSGGSSNDNAYFGYSTPWGYFDFNRFHCHFSPRDWQRLINNNWGFRPKRLNFKLFNIQVKEVTDNNGVKTIANNLTSTVQVFTDSDYQLPYVLGSAHEGCLPPFPADVFMIPQYGYLTLNDGSQAVGRSSFYCLEYFPSQMLRTGNNFQFSYEFENVPFHSSYAHSQSLDLLMNPLIDQYLYYLSKTINGSGQNQQTLKFSVAGPSNMAVQGRNYIPGPSYRQQRVSTTVTQNNNSEFAWPGASSWALNGRNSLMNPGPAMASHKEGEDRFFPLSGSLIFGKQGTGRDNVDADKVMITNEEEIKTTNPVATESYGQVATNHQSAQAQAQTGWVQNQGILPGMVWQDRDVYLQGPIWAKIPHTDGNFHPSPLMGGFGMKHPPPQILIKNTPVPADPPTAFNKDKLNSFITQYSTGQVSVEIEWELQKENSKRWNPEIQYTSNYYKSNNVEFAVNTEGVYSEPRPIGTRYLTRNL

SEQ ID NO: 373 - protein, 736 aa, Adeno-associated dependoparvovirus A
MAADGYLPDWLEDNLSEGIREWWALKPGAPQPKANQQHQDNARGLVLPGYKYLGPGNGLDKGEPVNAADAAALEHDKAYDQQLKAGDNPYLKYNHADAEFQERLKEDTSFGGNLGRAVFQAKKRLLEPLGLVEEAAKTAPGKKRPVEQSPQEPDSSAGIGKSGAQPAKKRLNFGQTGDTESVPDPQPIGEPPAAPSGVGSLTMASGGGAPVADNNEGADGVGSSSGNWHCDSQWLGDRVITTSTRTWALPTYNNHLYKQISNSTSGGSSNDNAYFGYSTPWGYFDFNRFHCHFSPRDWQRLINNNWGFRPKRLNFKLFNIQVKEVTDNNGVKTIANNLTSTVQVFTDSDYQLPYVLGSAHEGCLPPFPADVFMIPQYGYLTLNDGSQAVGRSSFYCLEYFPSQMLRTGNNFQFSYEFENVPFHSSYAHSQSLDRLMNPLIDQYLYYLSKTINGSGQNQQTLKFSVAGPSNMAVQGRNYIPGPSYRQQRVSTTVTQNNNSEFAWPGASSWALNGRNSLMNPGPAMASHKEGEDRFFPLSGSLIFGKQGTGRDNVDADKVMITNEEEIKTTNPVATESYGQVATNHQSAQAQAQTGWVQNQGILPGMVWQDRDVYLQGPIWAKIPHTDGNFHPSPLMGGFGMKHPPPQILIKNTPVPADPPTAFNKDKLNSFITQYSTGQVSVEIEWELQKENSKRWNPEIQYTSNYYKSNNVEFAVNTEGVYSEPRPIGTRYLTRNL

SEQ ID NO: 374 - DNA, 2211 bp, Adeno-associated dependoparvovirus A
  source 1..2211: mol_type = genomic DNA
atggctgccgatggttatcttccagattggctcgaggacaaccttagtgaaggaattcgcgagtggtgggctttgaaacctggagcccctcaacccaaggcaaatcaacaacatcaagacaacgctcgaggtcttgtgcttccgggttacaaataccttggacccggcaacggactcgacaagggggagccggtcaacgcagcagacgcggcggccctcgagcacgacaaggcctacgaccagcagctcaaggccggagacaacccgtacctcaagtacaaccacgccgacgccgagttccaggagcggctcaaagaagatacgtcttttgggggcaacctcgggcgagcagtcttccaggccaaaaagaggcttcttgaacctcttggtctggttgaggaagcggctaagacggctcctggaaagaagaggcctgtagagcagtctcctcaggaaccggactcctccgcgggtattggcaaatcgggtgcacagcccgctaaaaagagactcaatttcggtcagactggcgacacagagtcagtcccagaccctcaaccaatcggagaacctcccgcagccccctcaggtgtgggatctcttacaatggcttcaggtggtggcgcaccagtggcagacaataacgaaggtgccgatggagtgggtagttcctcgggaaattggcattgcgattcccaatggctgggggacagagtcatcaccaccagcacccgaacctgggccctgcccacctacaacaatcacctctacaagcaaatctccaacagcacatctggaggatcttcaaatgacaacgcctacttcggctacagcaccccctgggggtattttgacttcaacagattccactgccacttctcaccacgtgactggcagcgactcatcaacaacaactggggattccggcctaagcgactcaacttcaagctcttcaacattcaggtcaaagaggttacggacaacaatggagtcaagaccatcgccaataaccttaccagcacggtccaggtcttcacggactcagactatcagctcccgtacgtgctcgggtcggctcacgagggctgcctcccgccgttcccagcggacgttttcatgattcctcagtacgggtatctgacgcttaatgatggaagccaggccgtgggtcgttcgtccttttactgcctggaatatttcccgtcgcaaatgctaagaacgggtaacaacttccagttcagctacgagtttgagaacgtacctttccatagcagctacgctcacagccaaagcctggaccgactaatgaatccactcatcgaccaatacttgtactatctctcaaagactattaacggttctggacagaatcaacaaacgctaaaattcagtgtggccggacccagcaacatggctgtccagggaagaaactacatacctggacccagctaccgacaacaacgtgtctcaaccactgtgactcaaaacaacaacagcgaatttgcttggcctggagcttcttcttgggctctcaatggacgtaatagcttgatgaatcctggacctgctatggccagccacaaagaaggagaggaccgtttctttcctttgtctggatctttaatttttggcaaacaaggaactggaagagacaacgtggatgcggacaaagtcatgataaccaacgaagaagaaattaaaactactaacccggtagcaacggagtcctatggacaagtggccacaaaccaccagagtgcccaagcacaggcgcagaccggctgggttcaaaaccaaggaatacttccgggtatggtttggcaggacagagatgtgtacctgcaaggacccatttgggccaaaattcctcacacggacggcaactttcacccttctccgctgatgggagggtttggaatgaagcacccgcctcctcagatcctcatcaaaaacacacctgtacctgcggatcctccaacggccttcaacaaggacaagctgaactctttcatcacccagtattctactggccaagtcagcgtggagatcgagtgggagctgcagaaggaaaacagcaagcgctggaacccggagatccagtacacttccaactattacaagtctaataatgttgaatttgctgttaatactgaaggtgtatatagtgaaccccgccccattggcaccagatacctgactcgtaatctgtaa

SEQ ID NO: 375 - protein, 599 aa, Adeno-associated dependoparvovirus A
TAPGKKRPVEQSPQEPDSSAGIGKSGAQPAKKRLNFGQTGDTESVPDPQPIGEPPAAPSGVGSLTMASGGGAPVADNNEGADGVGSSSGNWHCDSQWLGDRVITTSTRTWALPTYNNHLYKQISNSTSGGSSNDNAYFGYSTPWGYFDFNRFHCHFSPRDWQRLINNNWGFRPKRLNFKLFNIQVKEVTDNNGVKTIANNLTSTVQVFTDSDYQLPYVLGSAHEGCLPPFPADVFMIPQYGYLTLNDGSQAVGRSSFYCLEYFPSQMLRTGNNFQFSYEFENVPFHSSYAHSQSLDRLMNPLIDQYLYYLSKTINGSGQNQQTLKFSVAGPSNMAVQGRNYIPGPSYRQQRVSTTVTQNNNSEFAWPGASSWALNGRNSLMNPGPAMASHKEGEDRFFPLSGSLIFGKQGTGRDNVDADKVMITNEEEIKTTNPVATESYGQVATNHQSAQAQAQTGWVQNQGILPGMVWQDRDVYLQGPIWAKIPHTDGNFHPSPLMGGFGMKHPPPQILIKNTPVPADPPTAFNKDKLNSFITQYSTGQVSVEIEWELQKENSKRWNPEIQYTSNYYKSNNVEFAVNTEGVYSEPRPIGTRYLTRNL

SEQ ID NO: 376 - DNA, 1800 bp, Adeno-associated dependoparvovirus A
  source 1..1800: mol_type = genomic DNA
acggctcctggaaagaagaggcctgtagagcagtctcctcaggaaccggactcctccgcgggtattggcaaatcgggtgcacagcccgctaaaaagagactcaatttcggtcagactggcgacacagagtcagtcccagaccctcaaccaatcggagaacctcccgcagccccctcaggtgtgggatctcttacaatggcttcaggtggtggcgcaccagtggcagacaataacgaaggtgccgatggagtgggtagttcctcgggaaattggcattgcgattcccaatggctgggggacagagtcatcaccaccagcacccgaacctgggccctgcccacctacaacaatcacctctacaagcaaatctccaacagcacatctggaggatcttcaaatgacaacgcctacttcggctacagcaccccctgggggtattttgacttcaacagattccactgccacttctcaccacgtgactggcagcgactcatcaacaacaactggggattccggcctaagcgactcaacttcaagctcttcaacattcaggtcaaagaggttacggacaacaatggagtcaagaccatcgccaataaccttaccagcacggtccaggtcttcacggactcagactatcagctcccgtacgtgctcgggtcggctcacgagggctgcctcccgccgttcccagcggacgttttcatgattcctcagtacgggtatctgacgcttaatgatggaagccaggccgtgggtcgttcgtccttttactgcctggaatatttcccgtcgcaaatgctaagaacgggtaacaacttccagttcagctacgagtttgagaacgtacctttccatagcagctacgctcacagccaaagcctggaccgactaatgaatccactcatcgaccaatacttgtactatctctcaaagactattaacggttctggacagaatcaacaaacgctaaaattcagtgtggccggacccagcaacatggctgtccagggaagaaactacatacctggacccagctaccgacaacaacgtgtctcaaccactgtgactcaaaacaacaacagcgaatttgcttggcctggagcttcttcttgggctctcaatggacgtaatagcttgatgaatcctggacctgctatggccagccacaaagaaggagaggaccgtttctttcctttgtctggatctttaatttttggcaaacaaggaactggaagagacaacgtggatgcggacaaagtcatgataaccaacgaagaagaaattaaaactactaacccggtagcaacggagtcctatggacaagtggccacaaaccaccagagtgcccaagcacaggcgcagaccggctgggttcaaaaccaaggaatacttccgggtatggtttggcaggacagagatgtgtacctgcaaggacccatttgggccaaaattcctcacacggacggcaactttcacccttctccgctgatgggagggtttggaatgaagcacccgcctcctcagatcctcatcaaaaacacacctgtacctgcggatcctccaacggccttcaacaaggacaagctgaactctttcatcacccagtattctactggccaagtcagcgtggagatcgagtgggagctgcagaaggaaaacagcaagcgctggaacccggagatccagtacacttccaactattacaagtctaataatgttgaatttgctgttaatactgaaggtgtatatagtgaaccccgccccattggcaccagatacctgactcgtaatctgtaa

SEQ ID NO: 377 - protein, 534 aa, Adeno-associated dependoparvovirus A
MASGGGAPVADNNEGADGVGSSSGNWHCDSQWLGDRVITTSTRTWALPTYNNHLYKQISNSTSGGSSNDNAYFGYSTPWGYFDFNRFHCHFSPRDWQRLINNNWGFRPKRLNFKLFNIQVKEVTDNNGVKTIANNLTSTVQVFTDSDYQLPYVLGSAHEGCLPPFPADVFMIPQYGYLTLNDGSQAVGRSSFYCLEYFPSQMLRTGNNFQFSYEFENVPFHSSYAHSQSLDRLMNPLIDQYLYYLSKTINGSGQNQQTLKFSVAGPSNMAVQGRNYIPGPSYRQQRVSTTVTQNNNSEFAWPGASSWALNGRNSLMNPGPAMASHKEGEDRFFPLSGSLIFGKQGTGRDNVDADKVMITNEEEIKTTNPVATESYGQVATNHQSAQAQAQTGWVQNQGILPGMVWQDRDVYLQGPIWAKIPHTDGNFHPSPLMGGFGMKHPPPQILIKNTPVPADPPTAFNKDKLNSFITQYSTGQVSVEIEWELQKENSKRWNPEIQYTSNYYKSNNVEFAVNTEGVYSEPRPIGTRYLTRNL

SEQ ID NO: 378 - DNA, 1605 bp, Adeno-associated dependoparvovirus A
  source 1..1605: mol_type = genomic DNA
atggcttcaggtggtggcgcaccagtggcagacaataacgaaggtgccgatggagtgggtagttcctcgggaaattggcattgcgattcccaatggctgggggacagagtcatcaccaccagcacccgaacctgggccctgcccacctacaacaatcacctctacaagcaaatctccaacagcacatctggaggatcttcaaatgacaacgcctacttcggctacagcaccccctgggggtattttgacttcaacagattccactgccacttctcaccacgtgactggcagcgactcatcaacaacaactggggattccggcctaagcgactcaacttcaagctcttcaacattcaggtcaaagaggttacggacaacaatggagtcaagaccatcgccaataaccttaccagcacggtccaggtcttcacggactcagactatcagctcccgtacgtgctcgggtcggctcacgagggctgcctcccgccgttcccagcggacgttttcatgattcctcagtacgggtatctgacgcttaatgatggaagccaggccgtgggtcgttcgtccttttactgcctggaatatttcccgtcgcaaatgctaagaacgggtaacaacttccagttcagctacgagtttgagaacgtacctttccatagcagctacgctcacagccaaagcctggaccgactaatgaatccactcatcgaccaatacttgtactatctctcaaagactattaacggttctggacagaatcaacaaacgctaaaattcagtgtggccggacccagcaacatggctgtccagggaagaaactacatacctggacccagctaccgacaacaacgtgtctcaaccactgtgactcaaaacaacaacagcgaatttgcttggcctggagcttcttcttgggctctcaatggacgtaatagcttgatgaatcctggacctgctatggccagccacaaagaaggagaggaccgtttctttcctttgtctggatctttaatttttggcaaacaaggaactggaagagacaacgtggatgcggacaaagtcatgataaccaacgaagaagaaattaaaactactaacccggtagcaacggagtcctatggacaagtggccacaaaccaccagagtgcccaagcacaggcgcagaccggctgggttcaaaaccaaggaatacttccgggtatggtttggcaggacagagatgtgtacctgcaaggacccatttgggccaaaattcctcacacggacggcaactttcacccttctccgctgatgggagggtttggaatgaagcacccgcctcctcagatcctcatcaaaaacacacctgtacctgcggatcctccaacggccttcaacaaggacaagctgaactctttcatcacccagtattctactggccaagtcagcgtggagatcgagtgggagctgcagaaggaaaacagcaagcgctggaacccggagatccagtacacttccaactattacaagtctaataatgttgaatttgctgttaatactgaaggtgtatatagtgaaccccgccccattggcaccagatacctgactcgtaatctgtaa
